(19) United States
(12) Patent Application Publication
(10) Pub. No.: US 2024/0133898 A1
(43) Pub. Date: Apr. 25, 2024

(54) COMPOSITIONS AND METHODS FOR IDENTIFICATION OF CROSS-REACTIVE ALLERGENIC PROTEINS AND TREATMENT OF ALLERGIES

(71) Applicant: Alladapt Immunotherapeutics, Inc., Menlo Park, CA (US)

(72) Inventors: Preeti Lal, Burlingame, CA (US); Ashley Dombkowski, Woodside, CA (US); Dana McClintock, San Mateo, CA (US)

(21) Appl. No.: 18/546,766

(22) PCT Filed: Feb. 24, 2022
(86) PCT No.: PCT/US2022/017700

§ 371 Date: Aug. 15, 2023

Related U.S. Application Data
(60) Provisional application No. 63/235,992, filed on Aug. 23, 2021.
(60) Provisional application No. 63/153,235, filed on Feb. 24, 2021.
(60) Provisional application No. 63/153,245, filed on Feb. 24, 2021.
(60) Provisional application No. 63/153,250, filed on Feb. 24, 2021.

(51) Int. Cl. G01N 33/68; A61K 9/00; A61K 39/35; A61K 39/36; A61P 37/08

(52) U.S. Cl. CPC G01N 33/6893; A61K 9/0053; A61K 39/35; A61K 39/36; A61P 37/08; G01N 33/6854; G01N 33/6878; A61K 2039/70; G01N 2800/24; G01N 2800/52

(57) ABSTRACT

The disclosure relates generally to methods of treating allergies in subjects, methods of monitoring treatment of allergies in subjects, methods of diagnosing allergies in subjects, methods for determining whether subjects are candidates for allergy treatments, methods and kits for detecting allergies or allergens, methods for identifying cross-reactive allergens, antibodies that bind allergenic proteins and methods of identifying the same, and multiple allergen compositions and methods of preparing the same.

### CROSS REFERENCE

[0001] This application claims the benefit of and priority to U.S. Provisional Patent Application No. 63/153,235, filed on Feb. 24, 2021; U.S. Provisional Patent Application No. 63/153,245, filed on Feb. 24, 2021; U.S. Provisional Patent Application No. 63/153,250, filed on Feb. 24, 2021; and U.S. Provisional Patent Application No. 63/235,992, filed on Aug. 23, 2021, the entire disclosure of each of which is hereby incorporated by reference in its entirety for all purposes.

### BACKGROUND

[0002] Allergy is a disorder of the immune system characterized by the occurrence of allergic reactions to normally harmless environmental substances. Allergies are caused by allergens, which may be present in a wide variety of sources, including but not limited to pollens or other plant components, dust, molds or fungi, foods, additives, latex, transfusion reactions, animal or bird danders, insect venoms, radiocontrast medium, medications or chemicals. Common allergic reactions include eczema, hives, hay fever, asthma, and reactions to venoms. Mild allergies like hay fever are highly prevalent in the human population and cause symptoms such as allergic conjunctivitis, itchiness, and runny nose. In some people, severe allergies to environmental or dietary allergens or to medication may result in life-threatening anaphylactic reactions and potentially death, if left untreated.

[0003] A food allergy is an adverse immune response to a food allergen, e.g., a food protein. Common food allergens are found in shellfish, peanuts, tree nuts, fish, milk, eggs, soy and fresh fruits such as strawberries, mangoes, bananas, and apples. Immunoglobulin E (IgE)-mediated food allergies are classified as type-I immediate hypersensitivity reactions. These allergic reactions have an acute onset (from seconds to one hour) and the accompanying symptoms may include angioedema (soft tissue swelling of the eyelids, face, lips, tongue, larynx and trachea), hives, itching of the mouth, throat, eyes, or skin, gastrointestinal symptoms such as nausea, vomiting, diarrhea, stomach cramps, or abdominal pain, rhinorrhea or nasal congestion, wheezing, shortness of breath, or difficulty swallowing, and even anaphylaxis, a severe, whole-body allergic reaction that can result in death.

[0004] While only 3% of adults suffer from food allergies, 8% of children under four years of age have a food allergy. This has been reported to be doubling every 10 years for certain nuts. It is estimated that over $24 billion is spent per year on health care costs for food allergic reactions, largely due to about 90,000 visits to the ER per year in the U.S. due to food induced anaphylactic symptoms. Moreover, there are still deaths that occur every year due to fatal food allergies.

[0005] Multi-allergic subjects are becoming increasingly common in the United States. Recent data show that approximately 30% to 60% of food-allergic subjects were allergic to multiple food. In a clinical trial, approximately two-thirds of peanut-allergic subjects were also allergic to 1 or more additional food sources. In nationwide epidemiological surveys of US adults and children, subjects who are reactive to foods other than peanuts show high rate of allergy to multiple foods. In a separate study, about half of multi-allergic subjects were found to be allergic to unique combinations of food allergies. Allergies to multiple foods increase the risk of anaphylaxis (due to accidental ingestion), increase anxiety, and worsen the disabling nature of food allergies for patients and their families, with significant impact on quality of life. Children with multiple food allergies are also more likely to experience an allergic reaction (0.7 to 3.4 reactions per year) compared with children with a single food allergy (0.2 reactions per year).

[0006] Current options in the management of foods that trigger food allergy include oral immunotherapy for specific foods, dietary avoidance of the allergenic food, and education of the patient/family on acute management of an allergic reaction. Despite efforts towards strict food allergen avoidance, accidental exposure continues to be a major concern.

[0007] The presence of cross-reactivity or co-recognition remains a confounding issue in the field of allergy. Cross-reactivity occurs when an individual has antibodies raised against a particular allergenic protein and these antibodies bind to another, usually structurally similar protein.

[0008] There remains an unmet medical need for methods, compositions, and kits for prediction and detection of cross-reactive allergens. There also remains an unmet need for new methods for treatment, prevention and monitoring individuals for clinically adverse effects from exposure to cross-reactive allergens and the resulting cross-reactive immune response, and for inducing parallel desensitization or tolerization in individuals having or at risk of having cross-reactivity to or co-recognition of multiple food allergenic proteins.

### SUMMARY

[0009] The disclosure relates generally to methods of treating allergies in subjects, methods of monitoring treatment of allergies in subjects, methods of diagnosing allergies in subjects, methods for determining whether subjects are candidates for allergy treatments, methods and kits for detecting allergies or allergens, methods for identifying cross-reactive allergens, antibodies that bind cross-reactive allergenic proteins and methods of identifying the same, and multiple allergen compositions and methods of preparing the same.

[0010] For example, in one aspect, provided herein is a method of treating a subject for two or more allergies. A contemplated method comprises: (a) identifying a subject as having a first allergy to a first allergenic protein; (b) identifying the subject as having a second allergy to a second allergenic protein that is immunologically cross-reactive with the first allergenic protein; and/or (c) administering a multiple allergen oral immunotherapy to the subject (for example, a multiple allergen oral immunotherapy that does not contain the second allergenic protein).

[0011] In certain embodiments, identifying a subject as having a first allergy includes evaluating the subject's clinical history of allergy and/or identifying a subject as having a second allergy does not include evaluating the subject's clinical history of allergy. In certain embodiments, identifying a subject as having a second allergy comprises assessing the presence of IgE antibodies in the subject that bind to a first allergenic protein, and/or assessing the presence of a T-cell epitope within a first allergenic protein.

[0012] In certain embodiments, a first allergy is a shrimp, cod, salmon, hen's egg, cow's milk, peanut, sesame, soy, pecan, cashew, hazelnut, walnut, pistachio, almond, or wheat allergy. In certain embodiments, a second allergy is a prawn, kiwi, brazil nut, lobster, celery, coconut, crab, apple, buckwheat, clam, pear, lentil, mussel, tomato, garden pea, oyster, stone fruit (e.g., apricot, peach, cherry), yellow mustard, abalone, birch tree, mung bean, squid, alder tree, lupin, octopus, white oak tree, Korean pine, house dust mite, cockroach, or yellow fever mosquito allergy.

[0013] In certain embodiments, a first and/or second allergenic protein is selected from the group consisting of proteins listed in Tables 4-7 and Tables 10-12.

[0014] A contemplated multiple allergen oral immunotherapy may, for example, comprise two or more of: a shrimp allergen, a cod allergen, a salmon allergen, a hen's egg allergen, a cow's milk allergen, a peanut allergen, a sesame allergen, a soy allergen, a pecan allergen, a cashew allergen, a hazelnut allergen, a walnut allergen, a pistachio allergen, an almond allergen, and a wheat allergen. In certain embodiments, a multiple allergen oral immunotherapy comprises a shrimp allergen, a cod allergen, a salmon allergen, a hen's egg allergen, a cow's milk allergen, a peanut allergen, a sesame allergen, a soy allergen, a pecan allergen, a cashew allergen, a hazelnut allergen, a walnut allergen, a pistachio allergen, an almond allergen, and a wheat allergen. In certain embodiments, a multiple allergen oral immunotherapy comprises one or more allergenic proteins listed in Table 2.

[0015] In another aspect, provided herein is a method of treating an allergy to kiwifruit, brazil nut, coconut, buckwheat, lentil, garden pea, yellow mustard, mung bean, lupin, and/or Korean pine in a subject in need thereof. A contemplated method comprises administering to a subject a soybean, sesame, pistachio, pecan, hazelnut, walnut, cashew, and/or almond allergen (for example, administering to a subject a multiple allergen oral immunotherapy comprising a soybean, sesame, pistachio, pecan, hazelnut, walnut, cashew, and/or almond allergen). In certain embodiments, a contemplated method does not include administering to a subject a kiwifruit, brazil nut, coconut, buckwheat, lentil, garden pea, yellow mustard, mung bean, lupin, and/or Korean pine allergen (for example, the method comprises administering to a subject a multiple allergen oral immunotherapy that does not include a kiwifruit, brazil nut, coconut, buckwheat, lentil, garden pea, yellow mustard, mung bean, lupin, and/or Korean pine allergen).

[0016] In another aspect, provided herein is a method for treating a subject in need thereof having an allergy to an allergenic protein listed in the first column (titled Allergen 1) of any one of Tables 10-12 (or an allergy to a food product including the allergenic protein). A contemplated method comprises administering to a subject an allergenic protein listed in the corresponding row of the second column (titled Allergen 2) of Tables 10-12, or a food product including the allergenic protein (for example, administering to the subject a multiple allergen oral immunotherapy comprising the allergenic protein listed in the corresponding row of the second column of Tables 10-12). In certain embodiments, a contemplated method does not include administering to the subject the allergenic protein listed in the first column (titled Allergen 1) of Tables 10-12, or a food product including the allergenic protein (for example, the method comprises administering to the subject a multiple allergen oral immunotherapy that does not include the allergenic protein listed in the first column of Tables 10-12).

[0017] In another aspect, provided herein is a method for treating a subject in need thereof having an allergy to an allergenic peptide listed in the third column (titled Peptide) of any one of Tables 13-23 (or an allergy to a protein or a food product including the allergenic peptide). A contemplated method comprises administering to the subject an allergenic protein listed in the corresponding row of the sixth column (titled Cross-Reactive Proteins) of Tables 13-23, or a food product including the allergenic protein (for example, administering to the subject a multiple allergen oral immunotherapy comprising the allergenic protein listed in the corresponding row of the sixth column of Tables 13-23). In certain embodiments, a contemplated method does not include administering to the subject the allergenic peptide listed in the third column (titled Peptide) of Tables 13-23, or a protein or food product including the allergenic peptide (for example, the method comprises administering to the subject a multiple allergen oral immunotherapy that does not include the allergenic peptide listed in the third column of Tables 13-23).

[0018] In another aspect, provided herein is a method for treating a subject in need thereof having an allergy to an allergenic protein listed in the sixth column (titled Cross-Reactive Proteins) of any one of Tables 13-23 (or an allergy to a food product including the allergenic protein). A contemplated method comprises administering to the subject an allergenic peptide listed in the corresponding row of the third column (titled Peptide) of Tables 13-23, or a protein or food product including the allergenic peptide (for example, administering to the subject a multiple allergen oral immunotherapy comprising the allergenic peptide listed in the corresponding row of the third column of Tables 13-23). In certain embodiments, a contemplated method does not include administering to the subject the allergenic protein listed in the sixth column (titled Cross-Reactive Proteins) of Tables 13-23, or a food product including the protein (for example, the method comprises administering to the subject a multiple allergen oral immunotherapy that does not include the allergenic protein listed in the sixth column of Tables 13-23).

[0019] In another aspect, provided herein is a method for detecting development of tolerance to and/or monitoring the efficacy of a multiple allergen oral immunotherapy in a subject being administered the multiple allergen oral immunotherapy and in need thereof. A contemplated method comprises: (a) obtaining a biological sample from a subject (for example, before, after, or during treatment of the subject); (b) contacting the biological sample with a reference allergenic protein present in the multiple allergen oral immunotherapy and/or an other protein that is immunologically cross reactive to the reference allergenic protein; (c) measuring an amount of IgE, IgG, or T-cells that bind to the reference allergenic protein and/or the other protein; and/or (d) comparing the amount of IgE, IgG or T-cells with a previous measurement of the amount of IgE, IgG or T-cells. Tolerance and/or efficacy may, for example, be indicated when the amount of IgE, IgG or T-cells, is less than the previous amount of IgE, IgG or T-cells.

[0020] Contemplated reference allergenic proteins include, for example, proteins elected from the group consisting of a shrimp allergen, a cod allergen, a salmon allergen, a hen's egg allergen, a cow's milk allergen, a peanut allergen, a sesame allergen, a soy allergen, a pecan allergen, a cashew allergen, a hazelnut allergen, a walnut allergen, a pistachio allergen, an almond allergen, and a wheat allergen. In certain embodiments, a reference allergenic protein is listed in Table 2.

[0021] Contemplated other proteins include, for example, proteins in the same protein family as a reference allergenic protein (for example, a protein family listed in Table 3), proteins listed in Tables 4-7 or Tables 10-12, or any other proteins identified by methods disclosed herein.

[0022] In certain embodiments, a reference allergenic protein and/or an other protein are coupled to a solid support to form one or more protein-solid support complexes. Protein-solid support complexes may, for example, be further bound to a labeling reagent.

[0023] In another aspect, provided herein is a method for detecting development of tolerance to a protein listed in the second column (titled Allergen 2) of any one of Tables 10-12, and/or monitoring the efficacy of a multiple allergen oral immunotherapy in treating an allergy to a protein listed in the second column of any one of Tables 10-12. A contemplated method comprises: (a) obtaining a biological sample from the subject (for example, before, after, or during treatment of the subject); (b) contacting the biological sample with a protein listed in the corresponding row of the first column (titled Allergen 1) of Tables 10-12; (c) measuring an amount of IgE, IgG, or T-cells that bind to the protein listed in the corresponding row of the first column of Tables 10-12; and/or (d) comparing the amount of IgE, IgG or T-cells with a previous measurement of an amount of IgE, IgG or T-cells. Tolerance and/or efficacy may, for example, be indicated when the amount of IgE, IgG or T-cells, is less than the previous amount of IgE, IgG or T-cells.

[0024] In another aspect, provided herein is a method for detecting development of tolerance to a peptide listed in the third column (titled Peptide) of any one of Tables 13-23, and/or monitoring the efficacy of a multiple allergen oral immunotherapy in treating an allergy to a peptide listed in the third column of any one of Tables 13-23. A contemplated method comprises: (a) obtaining a biological sample from the subject (for example, before, after, or during treatment of the subject); (b) contacting the biological sample with a protein listed in the corresponding row of the sixth column (titled Cross-Reactive Proteins) of Tables 13-23; (c) measuring an amount of IgE, IgG, or T-cells that bind to the protein listed in the corresponding row of the sixth column of Tables 13-23; and/or (d) comparing the amount of IgE, IgG or T-cells with a previous measurement of an amount of IgE, IgG or T-cells. Tolerance and/or efficacy may, for example, be indicated when the amount of IgE, IgG or T-cells, is less than the previous amount of IgE, IgG or T-cells.

[0025] In another aspect, provided herein is a method for detecting development of tolerance to a protein listed in the sixth column (titled Cross-Reactive Proteins) of any one of Tables 13-23, and/or monitoring the efficacy of a multiple allergen oral immunotherapy in treating an allergy to a protein listed in the sixth column of any one of Tables 13-23. A contemplated method comprises: (a) obtaining a biological sample from the subject (for example, before, after, or during treatment of the subject); (b) contacting the biological sample with a peptide listed in the corresponding row of the third column (titled Peptide) of Tables 13-23; (c) measuring an amount of IgE, IgG, or T-cells that bind to the peptide listed in the corresponding row of the third column of Tables 13-23; and/or (d) comparing the amount of IgE, IgG or T-cells with a previous measurement of an amount of IgE, IgG or T-cells. Tolerance and/or efficacy may, for example, be indicated when the amount of IgE, IgG or T-cells, is less than the previous amount of IgE, IgG or T-cells.

[0026] In another aspect, provided herein is a detection kit, for example, for a biological cross-reactivity IgE assay. A contemplated detection kit comprises six or more distinct peptides or proteins each bound to a solid support, wherein each protein or peptide is selected from the group consisting of: (i) proteins listed in Table 2; (ii) proteins listed in Tables 10-12; and/or (iii) peptides listed in Tables 13-23. In certain embodiments, a contemplated kit includes an IgE or IgG labeling reagent; a binding buffer; a wash buffer; a detection buffer; and/or instructions for use.

[0027] In another aspect, provided herein is a method of assessing the presence or absence of cross-reactive IgE antibodies or T-cells in a biological sample. A contemplated method comprises: (a) contacting the biological sample with a reference allergenic protein; (b) measuring the binding of IgE antibodies or T-cells to the reference allergenic proteins; and/or (c) identifying any proteins that are immunologically cross-reactive to the reference allergenic protein; to assess the presence of one or more cross-reactive IgE antibodies or T-cells. In certain embodiments, a method does not include measuring binding of IgE antibodies or T-cells to proteins that are immunologically cross-reactive to the reference allergenic protein. In certain embodiments, a reference allergenic protein is immobilized on a substrate.

[0028] In another aspect, provided herein is a method for testing whether a subject is a candidate for a multiple allergen oral immunotherapy. A contemplated method comprises: detecting in a biological sample from a subject the presence of IgE antibodies or T-cells that bind to a reference allergenic protein in a multiple allergen oral immunotherapy and an other protein that is immunologically cross-reactive with the reference protein, wherein if IgE antibodies or T-cells are present in the biological sample, the subject is a candidate for the multiple allergen oral immunotherapy. A subject may, for example, have not been identified as having an allergy to an other protein.

[0029] In another aspect, provided herein is a method for diagnosing a subject as having an allergy to an allergic protein listed in the first column (titled Allergen 1) of any one of Tables 10-12, or a food product including the allergenic protein in the first column of any one of Tables 10-12. A contemplated method comprises evaluating the subject, or a biological sample from the subject, for an allergic response to an allergenic protein listed in the corresponding row of the second column (titled Allergen 2) of Tables 10-12, or a food product including the allergenic protein in the corresponding row of the second column of Tables 10-12.

[0030] In another aspect, provided herein is a method for diagnosing a subject as having an allergy to an allergic peptide listed in the third column (titled Peptide) of any one of Tables 13-23, or a protein or food product including the allergic peptide listed in the third column of any one of Tables 13-23. A contemplated method comprises evaluating the subject, or a biological sample from the subject, for an allergic response to an allergenic protein listed in the corresponding row of the sixth column (titled Cross-Reactive Proteins) of Tables 13-23, or a food product including the allergenic protein listed in the corresponding row of the sixth column of Tables 13-23.

[0031] In another aspect, provided herein is a method for diagnosing a subject as having an allergy to an allergic protein listed in the sixth column (titled Cross-Reactive Proteins) of any one of Tables 13-23, or a food product including the allergic protein listed in the sixth column of any one of Tables 13-23. A contemplated method comprises evaluating the subject, or a biological sample from the subject, for an allergic response to an allergenic peptide listed in the corresponding row of the third column (titled Peptide) of Tables 13-23, or a protein or food product including the allergenic peptide listed in the corresponding row of the third column of Tables 13-23.

[0032] Exemplary solid supports or substrates include a membrane, a filter, a chip, a slide (such as a microscopic slide), an array (such as a microarray), a wafer, a fiber, a magnetic or a non-magnetic bead, a gel, a tubing, a plate (such as a microtiter plate), a microtiter strip, a polymer, a microparticle, a sphere, a microsphere, a nanosphere, a particle, a microparticle, a nanoparticle, or a capillary.

[0033] Exemplary biological samples include whole blood, serum, plasma, sputum, blood cells (e.g., peripheral blood mononuclear cells (PBMC), T-cells, B-cells, basophils, etc.), immune cells, a tissue sample, a biopsy sample, urine, tears, peritoneal fluid, pleural fluid, breast duct fluid, breast exudate, breast milk, breast fluids, saliva, semen, mucous, lymph, cytosol, ascites, amniotic fluid, bladder washes, and bronchioalveolar lavage.

[0034] In another aspect, provided herein is a method for identifying a protein that is immunologically cross-reactive to a reference allergenic protein, the method comprising: (a) identifying an other protein that is in the same protein domain family as the reference allergenic protein; and/or (b) calculating pairwise identity and/or similarity between an amino acid sequence (for example, a full-length amino acid sequence) of the reference allergenic protein and an other protein, so as to determine whether the other protein is cross-reactive to the reference allergenic protein.

[0035] In certain embodiments, step (b) comprises: (i) providing a dataset comprising the amino acid sequence of the reference allergenic protein and the other protein; (ii) inputting the dataset into a computer readable medium; (iii) performing a bioinformatic step to calculate pairwise identity and similarity between the reference allergenic protein and the other protein; and/or (iv) identifying the other protein as cross-reactive to the reference allergenic protein based on pairwise identity and similarity between the reference allergenic protein and the other protein.

[0036] A bioinformatic step may, for example, comprise applying an algorithm to determine homology between the reference allergenic protein and the other protein based on pairwise identity and similarity, wherein the algorithm is selected from the group consisting of GAP, BESTFIT, FASTA, TFASTA, BLAST, BLASTP, TBLASTN, FASTDB, ALIGN, CLUSTALW, and CLUSTAL-Omega, including any version thereof. In certain embodiments, a bioinformatic step comprises applying an algorithm comprising (identity+similarity)/2 to determine a cross-reactivity score, for example, an other protein is considered cross-reactive to a reference allergenic protein if the other protein has a cross-reactivity score of ≥0.5 with respect to the reference allergenic protein. In certain embodiments, an other protein is considered cross-reactive to a reference allergenic protein if the other protein has ≥70% homology to the reference allergenic protein.

[0037] A contemplated method may, for example, comprise, prior to step (a), identifying the reference allergenic protein as a protein in an allergenic food source, and/or mapping the reference allergenic protein to a protein domain family. A contemplated method may, for example, comprise identifying a T-cell epitope peptide, a B-cell epitope peptide, and/or an MHC-binding epitope peptide in the allergenic protein that is cross-reactive to a T-cell epitope peptide, a B-cell epitope peptides and/or an MHC-binding epitope in the other protein. In certain embodiments, a contemplated method further comprises determining the MHC binding potential of the T-cell or B-cell peptide. A contemplated method may, for example, comprise identifying proteins that are immunologically cross-reactive to each reference allergenic protein present in a food source to generate an allergenic map (AllerMap) of the food source.

[0038] In certain embodiments, a contemplated reference allergenic protein is present in a multiple allergen oral immunotherapy. For example, a reference allergenic protein may be selected from the group consisting of a shrimp allergen, a cod allergen, a salmon allergen, a hen's egg allergen, a cow's milk allergen, a peanut allergen, a sesame allergen, a soy allergen, a pecan allergen, a cashew allergen, a hazelnut allergen, a walnut allergen, a pistachio allergen, an almond allergen, and a wheat allergen, or be selected from the group consisting of allergenic proteins listed in Table 2. In certain embodiments, a contemplated other protein is selected from the group consisting of proteins listed in Tables 4-7 or Tables 10-12.

[0039] In certain embodiments, a contemplated protein family is selected from the group consisting of: Tropomyosin, EF hand family (Beta-parvalbumin), ATP:guanido phosphotransferase (Arginine Kinase), Triosephosphate isomerase, Fructose bisphosphate aldolase class I, Alpha/beta casein, Lipocalin, Kappa-casein, Transferrin, C-type lysozyme/alpha-lactalbumin family, Serum albumin, Enolase, Serpin serine protease inhibitor, Kazal-type serine protease inhibitor, Collagen, Lipoprotein, Prolamin superfamily, Cupin, Profilin, Bet v 1 family, Oleosin, Isoflavone reductase family, Plant defensin, 60S acidic ribosomal protein, Heat shock protein Hsp70, Fe/Mn superoxide dismutase, Papain-like cysteine protease, Thaumatin-like protein, Unclassified, GILT family, Hevein-like and class I/11 chitinase, Zinc finger, C3HC4 type (RING finger), SCAI family, Peroxidase, Serpin serine protease inhibitor, Thionin, Thioredoxin, Transcription elongation factor 1, Lipid transfer protein, and Triosephosphate isomerase.

[0040] The disclosure also provides methods of treating an allergy to a food source including an allergenic Cupin family protein (e.g., a protein identified in Table 5) in a subject in need thereof. A contemplated method comprises administering to the subject a multiple allergen oral immunotherapy composition comprising a food source including a cross-reactive allergenic Cupin family protein identified herein.

[0041] For example, provided herein is a method of treating an allergy to one or more of soybean, sesame, pistachio, pecan, hazelnut, walnut, cashew, peanut and almond in a subject in need thereof, the method comprising administering to the subject a multiple allergen oral immunotherapy composition comprising two or more of soybean, sesame, pistachio, pecan, hazelnut, walnut, cashew, peanut, almond, kiwifruit, brazil nut, coconut, buckwheat, lentil, garden pea, yellow mustard, mung bean, lupin, and/or korean pine, optionally wherein the multiple allergen oral immunotherapy composition does not comprise soybean, sesame, pistachio, pecan, hazelnut, walnut, cashew, peanut and/or almond. Provided herein is a method of treating an allergy to soybean in a subject in need thereof, the method comprising administering to the subject a multiple allergen oral immunotherapy composition comprising one or more of kiwifruit, brazil nut, coconut, buckwheat, lentil, garden pea, yellow mustard, mung bean, lupin, and korean pine, optionally wherein the multiple allergen oral immunotherapy composition does not comprise soybean. Provided herein is a method of treating an allergy to soybean in a subject in need thereof, the method comprising administering to the subject a multiple allergen oral immunotherapy composition comprising two or more of sesame, pistachio, pecan, hazelnut, walnut, cashew, peanut, almond, kiwifruit, brazil nut, coconut, buckwheat, lentil, garden pea, yellow mustard, mung bean, lupin, and korean pine, optionally wherein the multiple allergen oral immunotherapy composition does not comprise soybean. Provided herein is a method of treating an allergy to sesame in a subject in need thereof, the method comprising administering to the subject a multiple allergen oral immunotherapy composition comprising one or more of kiwifruit, brazil nut, coconut, buckwheat, lentil, garden pea, yellow mustard, mung bean, lupin, and korean pine, optionally wherein the multiple allergen oral immunotherapy composition does not comprise sesame. Provided herein is a method of treating an allergy to sesame in a subject in need thereof, the method comprising administering to the subject a multiple allergen oral immunotherapy composition comprising two or more of soybean, pistachio, pecan, hazelnut, walnut, cashew, peanut, almond, kiwifruit, brazil nut, coconut, buckwheat, lentil, garden pea, yellow mustard, mung bean, lupin, and korean pine, optionally wherein the multiple allergen oral immunotherapy composition does not comprise sesame. Provided herein is a method of treating an allergy to pistachio in a subject in need thereof, the method comprising administering to the subject a multiple allergen oral immunotherapy composition comprising one or more of kiwifruit, brazil nut, coconut, buckwheat, lentil, garden pea, yellow mustard, mung bean, lupin, and korean pine, optionally wherein the multiple allergen oral immunotherapy composition does not comprise pistachio. Provided herein is a method of treating an allergy to pistachio in a subject in need thereof, the method comprising administering to the subject a multiple allergen oral immunotherapy composition comprising two or more of soybean, sesame, pecan, hazelnut, walnut, cashew, peanut, almond, kiwifruit, brazil nut, coconut, buckwheat, lentil, garden pea, yellow mustard, mung bean, lupin, and korean pine, optionally wherein the multiple allergen oral immunotherapy composition does not comprise pistachio. Provided herein is a method of treating an allergy to pecan in a subject in need thereof, the method comprising administering to the subject a multiple allergen oral immunotherapy composition comprising one or more of kiwifruit, brazil nut, coconut, buckwheat, lentil, garden pea, yellow mustard, mung bean, lupin, and korean pine, optionally wherein the multiple allergen oral immunotherapy composition does not comprise pecan. Provided herein is a method of treating an allergy to pecan in a subject in need thereof, the method comprising administering to the subject a multiple allergen oral immunotherapy composition comprising two or more of soybean, sesame, pistachio, hazelnut, walnut, cashew, peanut, almond, kiwifruit, brazil nut, coconut, buckwheat, lentil, garden pea, yellow mustard, mung bean, lupin, and korean pine, optionally wherein the multiple allergen oral immunotherapy composition does not comprise pecan. Provided herein is a method of treating an allergy to hazelnut in a subject in need thereof, the method comprising administering to the subject a multiple allergen oral immunotherapy composition comprising one or more of kiwifruit, brazil nut, coconut, buckwheat, lentil, garden pea, yellow mustard, mung bean, lupin, and korean pine, optionally wherein the multiple allergen oral immunotherapy composition does not comprise hazelnut. Provided herein is a method of treating an allergy to hazelnut in a subject need thereof, the method comprising administering to the subject a multiple allergen oral immunotherapy composition comprising two or more of soybean, sesame, pistachio, pecan, walnut, cashew, peanut, almond, kiwifruit, brazil nut, coconut, buckwheat, lentil, garden pea, yellow mustard, mung bean, lupin, and korean pine, optionally wherein the multiple allergen oral immunotherapy composition does not comprise hazelnut. Provided herein is a method of treating an allergy to walnut in a subject in need thereof, the method comprising administering to the subject a multiple allergen oral immunotherapy composition comprising one or more of kiwifruit, brazil nut, coconut, buckwheat, lentil, garden pea, yellow mustard, mung bean, lupin, and korean pine, optionally wherein the multiple allergen oral immunotherapy composition does not comprise walnut. Provided herein is a method of treating an allergy to walnut in a subject need thereof, the method comprising administering to the subject a multiple allergen oral immunotherapy composition comprising two or more of soybean, sesame, pistachio, pecan, hazelnut, cashew, peanut, almond, kiwifruit, brazil nut, coconut, buckwheat, lentil, garden pea, yellow mustard, mung bean, lupin, and korean pine, optionally wherein the multiple allergen oral immunotherapy composition does not comprise walnut. Provided herein is a method of treating an allergy to cashew in a subject in need thereof, the method comprising administering to the subject a multiple allergen oral immunotherapy composition comprising one or more of kiwifruit, brazil nut, coconut, buckwheat, lentil, garden pea, yellow mustard, mung bean, lupin, and korean pine, optionally wherein the multiple allergen oral immunotherapy composition does not comprise cashew. Provided herein is a method of treating an allergy to cashew in a subject need thereof, the method comprising administering to the subject a multiple allergen oral immunotherapy composition comprising two or more of soybean, sesame, pistachio, pecan, hazelnut, walnut, peanut, almond, kiwifruit, brazil nut, coconut, buckwheat, lentil, garden pea, yellow mustard, mung bean, lupin, and korean pine, optionally wherein the multiple allergen oral immunotherapy composition does not comprise cashew. Provided herein is a method of treating an allergy to peanut in a subject in need thereof, the method comprising administering to the subject a multiple allergen oral immunotherapy composition comprising one or more of kiwifruit, brazil nut, coconut, buckwheat, lentil, garden pea, yellow mustard, mung bean, lupin, and korean pine, optionally wherein the multiple allergen oral immunotherapy composition does not comprise peanut. Provided herein is a method of treating an allergy to peanut in a subject need thereof, the method comprising administering to the subject a multiple allergen oral immunotherapy composition comprising two or more of soybean, sesame, pistachio, pecan, hazelnut, walnut, cashew, almond, kiwifruit, brazil nut, coconut, buckwheat, lentil, garden pea, yellow mustard, mung bean, lupin, and korean pine, optionally wherein the multiple allergen oral immunotherapy composition does not comprise peanut. Provided herein is a method of treating an allergy to almond in a subject in need thereof, the method comprising administering to the subject a multiple allergen oral immunotherapy composition comprising one or more of kiwifruit, brazil nut, coconut, buckwheat, lentil, garden pea, yellow mustard, mung bean, lupin, and korean pine, optionally wherein the multiple allergen oral immunotherapy composition does not comprise almond. Provided herein is a method of treating an allergy to almond in a subject need thereof, the method comprising administering to the subject a multiple allergen oral immunotherapy composition comprising two or more of soybean, sesame, pistachio, pecan, hazelnut, walnut, cashew, peanut, kiwifruit, brazil nut, coconut, buckwheat, lentil, garden pea, yellow mustard, mung bean, lupin, and korean pine, optionally wherein the multiple allergen oral immunotherapy composition does not comprise almond.

[0042] Similarly, the disclosure also provides methods of treating an allergy to a food source including an allergenic Tropomyosin family protein (e.g., a protein identified in Table 6) or an allergenic Bet v 1 family protein (e.g., a protein identified in Table 7) in a subject in need thereof. A contemplated method comprises administering to the subject a multiple allergen oral immunotherapy composition comprising a food source including a cross-reactive allergenic Tropomyosin family protein or a cross-reactive allergenic Bet v 1 family protein identified herein, respectively.

[0043] The disclosure also provides methods of treating an allergy to a first Cupin family protein (e.g., a protein identified in FIG. 12), or a food source including the first Cupin family protein, in a subject in need thereof. A contemplated method comprises administering to the subject a second Cupin family protein that is cross-reactive with the first Cupin family protein (e.g., a protein that in FIG. 12 is connected to the first Cupin family protein by a line) or a food source including the second Cupin family protein.

[0044] For example, provided herein is a method of treating an allergy to an Ana o 1 protein, or a food source comprising the Ana o 1 protein, in a subject in need thereof, the method comprising administering to the subject: a Cor a 11 protein, or a food source comprising the Cor a 11 protein; a Pis v 3 protein, or a food source comprising the Pis v 3 protein; and/or a Ses i 3 protein, or a food source comprising the Ses i 3 protein; optionally wherein the method does not comprise administering to the subject the Ana o 1 protein or a food source comprising the Ana o 1 protein. Provided herein is a method of treating an allergy to an Ana o 2 protein, or a food source comprising the Ana o 2 protein, in a subject in need thereof, the method comprising administering to the subject: an Ara h 3 protein, or a food source comprising the Ara h 3 protein; a Car i 4 protein, or a food source comprising the Car i 4 protein; a Cor a 9 protein, or a food source comprising the Cor a 9 protein; a Gly m 6 protein, or a food source comprising the Gly m 6 protein; a Jug n 4 protein, or a food source comprising the Jug n 4 protein; a Jug r 4 protein, or a food source comprising the Jug r 4 protein; a Pis v 2 protein, or a food source comprising the Pis v 2 protein; a Pis v 5 protein, or a food source comprising the Pis v 5 protein; a Pru du 6 protein, or a food source comprising the Pru du 6 protein; a Ses i 6 protein, or a food source comprising the Ses i 6 protein; a Ses i 7 protein, or a food source comprising the Ses i 7 protein; a Ber e 2 protein, or a food source comprising the Ber e 2 protein; a Fag e 1 protein, or a food source comprising the Fag e 1 protein; a Fag t 13s g protein, or a food source comprising the Fag t 13s g protein; and/or a Sin a 2 protein, or a food source comprising the Sin a 2 protein; optionally wherein the method does not comprise administering to the subject the Ana o 2 protein or a food source comprising the Ana o 2 protein. Provided herein is a method of treating an allergy to an Ara h 1 protein, or a food source comprising the Ara h 1 protein, in a subject in need thereof, the method comprising administering to the subject: a Car i 2 protein, or a food source comprising the Car i 2 protein; a Gly m 5 protein, or a food source comprising the Gly m 5 protein; a Jug r 2 protein, or a food source comprising the Jug r 2 protein; a Ses i 3 protein, or a food source comprising the Ses i 3 protein; a Len c 1 protein, or a food source comprising the Len c 1 protein; a Lup an 1 protein, or a food source comprising the Lup an 1 protein; a Lup a v protein, or a food source comprising the Lup a v protein; a Pis s 1 protein, or a food source comprising the Pis s 1 protein; a Pis s 2 protein, or a food source comprising the Pis s 2 protein; and/or a Vig r 2 protein, or a food source comprising the Vig r 2 protein; optionally wherein the method does not comprise administering to the subject the Ara h 1 protein or a food source comprising the Ara h 1 protein. Provided herein is a method of treating an allergy to an Ara h 3 protein, or a food source comprising the Ara h 3 protein, in a subject in need thereof, the method comprising administering to the subject: a Car i 4 protein, or a food source comprising the Car i 4 protein; a Cor a 9 protein, or a food source comprising the Cor a 9 protein; a Jug n 4 protein, or a food source comprising the Jug n 4 protein; a Jug r 4 protein, or a food source comprising the Jug r 4 protein; a Pis v 2 protein, or a food source comprising the Pis v 2 protein; a Pis v 5 protein, or a food source comprising the Pis v 5 protein; a Pru du 6 protein, or a food source comprising the Pru du 6 protein; a Ses i 6 protein, or a food source comprising the Ses i 6 protein; a Ses i 7 protein, or a food source comprising the Ses i 7 protein; a Fag e 1 protein, or a food source comprising the Fag e 1 protein; a Fag t 13s g protein, or a food source comprising the Fag t 13s g protein; and/or an Ana o 2 protein, or a food source comprising the Ana o 2; optionally wherein the method does not comprise administering to the subject the Ara h 3 protein or a food source comprising the Ara h 3 protein. Provided herein is a method of treating an allergy to a Ber e 2 protein, or a food source comprising the Ber e 2 protein, in a subject in need thereof, the method comprising administering to the subject: a Fag e 1 protein, or a food source comprising the Fag e 1 protein; a Fag t 13s g protein, or a food source comprising the Fag t 13s g protein; an Ana o 2 protein, or a food source comprising the Ana o 2 protein; a Car i 4 protein, or a food source comprising the Car i 4 protein; a Cor a 9 protein, or a food source comprising the Cor a 9 protein; a Gly m 6 protein, or a food source comprising the Gly m 6 protein; a Jug n 4 protein, or a food source comprising the Jug n 4 protein; a Jug r 4 protein, or a food source comprising the Jug r 4 protein; a Pis v 2 protein, or a food source comprising the Pis v 2 protein; a Pis v 5 protein, or a food source comprising the Pis v 5 protein; a Pru du 6 protein, or a food source comprising the Pru du 6 protein; a Ses i 6 protein, or a food source comprising the Ses i 6 protein; and/or a Ses i 7 protein, or a food source comprising the Ses i 7 protein; optionally wherein the method does not comprise administering to the subject the Ber e 2 protein or a food source comprising the Ber e 2 protein. Provided herein is a method of treating an allergy to a Car i 2 protein, or a food source comprising the Car i 2 protein, in a subject in need thereof, the method comprising administering to the subject: a Cor a 11 protein, or a food source comprising the Cor a 11 protein; a Gly m 5 protein, or a food source comprising the Gly m 5 protein; a Jug r 2 protein, or a food source comprising the Jug r 2 protein; a Pis v 3 protein, or a food source comprising the Pis v 3 protein; a Ses i 3 protein, or a food source comprising the Ses i 3 protein; a Len c 1 protein, or a food source comprising the Len c 1 protein; a Lup an 1 protein, or a food source comprising the Lup an 1 protein; a Lup a v protein, or a food source comprising the Lup a v protein; a Pin k 2 protein, or a food source comprising the Pin k 2 protein; a Pis s 2 protein, or a food source comprising the Pis s 2 protein; a Vig r 2 protein, or a food source comprising the Vig r 2 protein; and/or an Ara h 1 protein, or a food source comprising the Ara h 1 protein; optionally wherein the method does not comprise administering to the subject the Car i 2 protein or a food source comprising the Car i 2 protein. Provided herein is a method of treating an allergy to a Car i 4 protein, or a food source comprising the Car i 4 protein, in a subject in need thereof, the method comprising administering to the subject: a Cor a 9 protein, or a food source comprising the Cor a 9 protein; a Gly m 6 protein, or a food source comprising the Gly m 6 protein; a Jug n 4 protein, or a food source comprising the Jug n 4 protein; a Jug r 4 protein, or a food source comprising the Jug r 4 protein; a Pis v 2 protein, or a food source comprising the Pis v 2 protein; a Pis v 5 protein, or a food source comprising the Pis v 5 protein; a Pru du 6 protein, or a food source comprising the Pru du 6 protein; a Ses i 6 protein, or a food source comprising the Ses i 6 protein; a Ses i 7 protein, or a food source comprising the Ses i 7 protein; a Ber e 2 protein, or a food source comprising the Ber e 2 protein; a Fag e 1 protein, or a food source comprising the Fag e 1 protein; a Fag t 13s g protein, or a food source comprising the Fag t 13s g protein; a Sin a 2 protein, or a food source comprising the Sin a 2 protein; an Ana o 2 protein, or a food source comprising the Ana o 2 protein; and/or an Ara h 3 protein, or a food source comprising the Ara h 3 protein; optionally wherein the method does not comprise administering to the subject the Car i 4 protein or a food source comprising the Car i 4 protein. Provided herein is a method of treating an allergy to a Cor a 11 protein, or a food source comprising the Cor a 11 protein, in a subject in need thereof, the method comprising administering to the subject: a Jug r 2 protein, or a food source comprising the Jug r 2 protein; a Pis v 3 protein, or a food source comprising the Pis v 3 protein; a Len c 1 protein, or a food source comprising the Len c 1 protein; a Pin k 2 protein, or a food source comprising the Pin k 2 protein; a Pis s 1 protein, or a food source comprising the Pis s 1 protein; a Pis s 2 protein, or a food source comprising the Pis s 2 protein; an Ana o 1 protein, or a food source comprising the Ana o 1 protein; and/or a Car i 2 protein, or a food source comprising the Car i 2 protein; optionally wherein the method does not comprise administering to the subject the Cor a 11 protein or a food source comprising the Cor a 11 protein. Provided herein is a method of treating an allergy to a Cor a 9 protein, or a food source comprising the Cor a 9 protein, in a subject in need thereof, the method comprising administering to the subject: a Gly m 6 protein, or a food source comprising the Gly m 6 protein; a Jug n 4 protein, or a food source comprising the Jug n 4 protein; a Jug r 4 protein, or a food source comprising the Jug r 4 protein; a Pis v 2 protein, or a food source comprising the Pis v 2 protein; a Pis v 5 protein, or a food source comprising the Pis v 5 protein; a Pru du 6 protein, or a food source comprising the Pru du 6 protein; a Ses i 6 protein, or a food source comprising the Ses i 6 protein; a Ses i 7 protein, or a food source comprising the Ses i 7 protein; a Ber e 2 protein, or a food source comprising the Ber e 2 protein; a Fag e 1 protein, or a food source comprising the Fag e 1 protein; a Fag t 13s g protein, or a food source comprising the Fag t 13s g protein; a Sin a 2 protein, or a food source comprising the Sin a 2 protein; an Ana o 2 protein, or a food source comprising the Ana o 2 protein; an Ara h 3 protein, or a food source comprising the Ara h 3 protein; and/or a Car i 4 protein, or a food source comprising the Car i 4 protein; optionally wherein the method does not comprise administering to the subject the Cor a 9 protein or a food source comprising the Cor a 9 protein. Provided herein is a method of treating an allergy to a Fag e 1 protein, or a food source comprising the Fag e 1 protein, in a subject in need thereof, the method comprising administering to the subject: a Fag t 13s g protein, or a food source comprising the Fag t 13s g protein; an Ana o 2 protein, or a food source comprising the Ana o 2 protein; an Ara h 3 protein, or a food source comprising the Ara h 3 protein; a Car i 4 protein, or a food source comprising the Car i 4 protein; a Cor a 9 protein, or a food source comprising the Cor a 9 protein; a Gly m 6 protein, or a food source comprising the Gly m 6 protein; a Jug r 4 protein, or a food source comprising the Jug r 4 protein; a Pis v 2 protein, or a food source comprising the Pis v 2 protein; a Pis v 5 protein, or a food source comprising the Pis v 5 protein; a Pru du 6 protein, or a food source comprising the Pru du 6 protein; a Ses i 7 protein, or a food source comprising the Ses i 7 protein; and/or a Ber e 2 protein, or a food source comprising the Ber e 2 protein; optionally wherein the method does not comprise administering to the subject the Fag e 1 protein or a food source comprising the Fag e 1 protein. Provided herein is a method of treating an allergy to a Fag t 13s g protein, or a food source comprising the Fag t 13s g protein, in a subject in need thereof, the method comprising administering to the subject: an Ana o 2 protein, or a food source comprising the Ana o 2 protein; an Ara h 3 protein, or a food source comprising the Ara h 3 protein; a Car i 4 protein, or a food source comprising the Car i 4 protein; a Cor a 9 protein, or a food source comprising the Cor a 9 protein; a Gly m 6 protein, or a food source comprising the Gly m 6 protein; a Jug r 4 protein, or a food source comprising the Jug r 4 protein; a Pis v 2 protein, or a food source comprising the Pis v 2 protein; a Pis v 5 protein, or a food source comprising the Pis v 5 protein; a Pru du 6 protein, or a food source comprising the Pru du 6 protein; a Ses i 7 protein, or a food source comprising the Ses i 7 protein; a Ber e 2 protein, or a food source comprising the Ber e 2 protein; and/or a Fag e 1 protein, or a food source comprising the Fag e 1 protein; optionally wherein the method does not comprise administering to the subject the Fag t 13s g protein or a food source comprising the Fag t 13s g protein. Provided herein is a method of treating an allergy to a Gly m 5 protein, or a food source comprising the Gly m 5 protein, in a subject in need thereof, the method comprising administering to the subject: a Jug r 2 protein, or a food source comprising the Jug r 2 protein; a Len c 1 protein, or a food source comprising the Len c 1 protein; a Lup an 1 protein, or a food source comprising the Lup an 1 protein; a Lup a v protein, or a food source comprising the Lup a v protein; a Pis s 1 protein, or a food source comprising the Pis s 1 protein; a Pis s 2 protein, or a food source comprising the Pis s 2 protein; a Vig r 2 protein, or a food source comprising the Vig r 2 protein; an Ara h 1 protein, or a food source comprising the Ara h 1 protein; and/or a Car i 2 protein, or a food source comprising the Car i 2 protein; optionally wherein the method does not comprise administering to the subject the Gly m 5 protein or a food source comprising the Gly m 5 protein. Provided herein is a method of treating an allergy to a Gly m 6 protein, or a food source comprising the Gly m 6 protein, in a subject in need thereof, the method comprising administering to the subject: a Jug n 4 protein, or a food source comprising the Jug n 4 protein; a Jug r 4 protein, or a food source comprising the Jug r 4 protein; a Pis v 2 protein, or a food source comprising the Pis v 2 protein; a Pru du 6 protein, or a food source comprising the Pru du 6 protein; a Ses i 7 protein, or a food source comprising the Ses i 7 protein; a Ber e 2 protein, or a food source comprising the Ber e 2 protein; a Fag e 1 protein, or a food source comprising the Fag e 1 protein; a Fag t 13s g protein, or a food source comprising the Fag 13s g protein; an Ana o 2 protein, or a food source comprising the Ana o 2 protein; a Car i 4 protein, or a food source comprising the Car i 4 protein; and/or a Cor a 9 protein, or a food source comprising the Cor a 9 protein; optionally wherein the method does not comprise administering to the subject the Gly m 6 protein or a food source comprising the Gly m 6 protein. Provided herein is a method of treating an allergy to a Jug n 4 protein, or a food source comprising the Jug n 4 protein, in a subject in need thereof, the method comprising administering to the subject: a Jug r 4 protein, or a food source comprising the Jug r 4 protein; a Pis v 2 protein, or a food source comprising the Pis v 2 protein; a Pis v 5 protein, or a food source comprising the Pis v 5 protein; a Pru du 6 protein, or a food source comprising the Pru du 6 protein; a Ses i 6 protein, or a food source comprising the Ses i 6 protein; a Ses i 7 protein, or a food source comprising the Ses i 7 protein; a Ber e 2 protein, or a food source comprising the Ber e 2 protein; a Sin a 2 protein, or a food source comprising the Sin a 2 protein; an Ana o 2 protein, or a food source comprising the Ana o 2 protein; an Ara h 3 protein, or a food source comprising the Ara h 3 protein; a Car i 4 protein, or a food source comprising the Car i 4 protein; a Cor a 9 protein, or a food source comprising the Cor a 9 protein; and/or a Gly m 6 protein, or a food source comprising the Gly m 6 protein; optionally wherein the method does not comprise administering to the subject the Jug n 4 protein or a food source comprising the Jug n 4 protein. Provided herein is a method of treating an allergy to a Jug r 2 protein, or a food source comprising the Jug r 2 protein, in a subject in need thereof, the method comprising administering to the subject: a Ses i 3 protein, or a food source comprising the Ses i 3 protein; a Len c 1 protein, or a food source comprising the Len c 1 protein; a Pin k 2 protein, or a food source comprising the Pin k 2 protein; a Pis s 1 protein, or a food source comprising the Pis s 1 protein; a Pis s 2 protein, or a food source comprising the Pis s 2 protein; a Vig r 2 protein, or a food source comprising the Vig r 2 protein; an Ara h 1 protein, or a food source comprising the Ara h 1 protein; a Car i 2 protein, or a food source comprising the Car i 2 protein; a Cor a 11 protein, or a food source comprising the Cor a 11 protein; and/or a Gly m 5 protein, or a food source comprising the Gly m 5 protein; optionally wherein the method does not comprise administering to the subject the Jug r 2 protein or a food source comprising the Jug r 2 protein. Provided herein is a method of treating an allergy to a Jug r 4 protein, or a food source comprising the Jug r 4 protein, in a subject in need thereof, the method comprising administering to the subject: a Pis v 2 protein, or a food source comprising the Pis v 2 protein; a Pis v 5 protein, or a food source comprising the Pis v 5 protein; a Pru du 6 protein, or a food source comprising the Pru du 6 protein; a Ses i 6 protein, or a food source comprising the Ses i 6 protein; a Ses i 7 protein, or a food source comprising the Ses i 7 protein; a Ber e 2 protein, or a food source comprising the Ber e 2 protein; a Fag e 1 protein, or a food source comprising the Fag e 1 protein; a Fag t 13s g protein, or a food source comprising the Fag t 13s g protein; a Sin a 2 protein, or a food source comprising the Sin a 2 protein; an Ana o 2 protein, or a food source comprising the Ana o 2 protein; an Ara h 3 protein, or a food source comprising the Ara h 3 protein; a Car i 4 protein, or a food source comprising the Car i 4 protein; a Cor a 9 protein, or a food source comprising the Cor a 9 protein; a Gly m 6 protein, or a food source comprising the Gly m 6 protein; and/or a Jug n 4 protein, or a food source comprising the Jug n 4 protein; optionally wherein the method does not comprise administering to the subject the Jug r 4 protein or a food source comprising the Jug r 4 protein. Provided herein is a method of treating an allergy to a Len c 1 protein, or a food source comprising the Len c 1 protein, in a subject in need thereof, the method comprising administering to the subject: a Lup an 1 protein, or a food source comprising the Lup an 1 protein; a Lup a v protein, or a food source comprising the Lup a v protein; a Pis s 1 protein, or a food source comprising the Pis s 1 protein; a Pis s 2 protein, or a food source comprising the Pis s 2 protein; a Vig r 2 protein, or a food source comprising the Vig r 2 protein; an Ara h 1 protein, or a food source comprising the Ara h 1 protein; a Car i 2 protein, or a food source comprising the Car i 2 protein; a Cor a 11 protein, or a food source comprising the Cor a 11 protein; a Gly m 5 protein, or a food source comprising the Gly m 5 protein; a Jug r 2 protein, or a food source comprising the Jug r 2 protein; and/or a Ses i 3 protein, or a food source comprising the Ses i 3 protein; optionally wherein the method does not comprise administering to the subject the Len c 1 protein or a food source comprising the Len c 1 protein. Provided herein is a method of treating an allergy to a Lup an 1 protein, or a food source comprising the Lup an 1 protein, in a subject in need thereof, the method comprising administering to the subject: a Lup a v protein, or a food source comprising the Lup a v protein; a Pis s 1 protein, or a food source comprising the Pis s 1 protein; a Pis s 2 protein, or a food source comprising the Pis s 2 protein; a Vig r 2 protein, or a food source comprising the Vig r 2 protein; an Ara h 1 protein, or a food source comprising the Ara h 1 protein; a Car i 2 protein, or a food source comprising the Car i 2 protein; a Gly m 5 protein, or a food source comprising the Gly m 5 protein; a Ses i 3 protein, or a food source comprising the Ses i 3 protein; and/or a Len c 1 protein, or a food source comprising the Len c 1 protein; optionally wherein the method does not comprise administering to the subject the Lup an 1 protein or a food source comprising the Lup an 1 protein. Provided herein is a method of treating an allergy to a Lup a v protein, or a food source comprising the Lup a v protein, in a subject in need thereof, the method comprising administering to the subject: a Pis s 1 protein, or a food source comprising the Pis s 1 protein; a Pis s 2 protein, or a food source comprising the Pis s 2 protein; a Vig r 2 protein, or a food source comprising the Vig r 2 protein; an Ara h 1 protein, or a food source comprising the Ara h 1 protein; a Car i 2 protein, or a food source comprising the Car i 2 protein; a Gly m 5 protein, or a food source comprising the Gly m 5 protein; a Len c 1 protein, or a food source comprising the Len c 1 protein; and/or a Lup an 1 protein, or a food source comprising the Lup an 1 protein; optionally wherein the method does not comprise administering to the subject the Lup a v protein or a food source comprising the Lup a v protein. Provided herein is a method of treating an allergy to a Pin k 2 protein, or a food source comprising the Pin k 2 protein, in a subject in need thereof, the method comprising administering to the subject: a Car i 2 protein, or a food source comprising the Car i 2 protein; a Cor a 11 protein, or a food source comprising the Cor a 11 protein; a Jug r 2 protein, or a food source comprising the Jug r 2 protein; and/or a Pis v 3 protein, or a food source comprising the Pis v 3 protein; optionally wherein the method does not comprise administering to the subject the Pin k 2 protein or a food source comprising the Pin k 2 protein. Provided herein is a method of treating an allergy to a Pis s 1 protein, or a food source comprising the Pis s 1 protein, in a subject in need thereof, the method comprising administering to the subject: a Pis s 2 protein, or a food source comprising the Pis s 2 protein; a Vig r 2 protein, or a food source comprising the Vig r 2 protein; an Ara h 1 protein, or a food source comprising the Ara h 1 protein; a Car i 2 protein, or a food source comprising the Car i 2 protein; a Cor a 11 protein, or a food source comprising the Cor a 11 protein; a Gly m 5 protein, or a food source comprising the Gly m 5 protein; a Jug r 2 protein, or a food source comprising the Jug r 2 protein; a Ses i 3 protein, or a food source comprising the Ses i 3 protein; a Len c 1 protein, or a food source comprising the Len c 1 protein; a Lup an 1 protein, or a food source comprising the Lup an 1 protein; and/or a Lup a v protein, or a food source comprising the Lup a v protein; optionally wherein the method does not comprise administering to the subject the Pis s 1 protein or a food source comprising the Pis s 1 protein. Provided herein is a method of treating an allergy to a Pis s 2 protein, or a food source comprising the Pis s 2 protein, in a subject in need thereof, the method comprising administering to the subject: a Vig r 2 protein, or a food source comprising the Vig r 2 protein; an Ara h 1 protein, or a food source comprising the Ara h 1 protein; a Car i 2 protein, or a food source comprising the Car i 2 protein; a Cor a 11 protein, or a food source comprising the Cor a 11 protein; a Gly m 5 protein, or a food source comprising the Gly m 5 protein; a Jug r 2 protein, or a food source comprising the Jug r 2 protein; a Ses i 3 protein, or a food source comprising the Ses i 3 protein; a Len c 1 protein, or a food source comprising the Len c 1 protein; a Lup an 1 protein, or a food source comprising the Lup an 1 protein; a Lup a v protein, or a food source comprising the Lup a v protein; and/or a Pis s 1 protein, or a food source comprising the Pis s 1 protein; optionally wherein the method does not comprise administering to the subject the Pis s 2 protein or a food source comprising the Pis s 2 protein. Provided herein is a method of treating an allergy to a Pis v 2 protein, or a food source comprising the Pis v 2 protein, in a subject in need thereof, the method comprising administering to the subject: a Pis v 5 protein, or a food source comprising the Pis v 5 protein; a Pru du 6 protein, or a food source comprising the Pru du 6 protein; a Ses i 6 protein, or a food source comprising the Ses i 6 protein; a Ses i 7 protein, or a food source comprising the Ses i 7 protein; a Ber e 2 protein, or a food source comprising the Ber e 2 protein; a Fag e 1 protein, or a food source comprising the Fag e 1 protein; a Fag t 13s g protein, or a food source comprising the Fag t 13s g protein; an Ana o 2 protein, or a food source comprising the Ana o 2 protein; an Ara h 3 protein, or a food source comprising the Ara h 3 protein; a Car i 4 protein, or a food source comprising the Car i 4 protein; a Cor a 9 protein, or a food source comprising the Cor a 9 protein; a Gly m 6 protein, or a food source comprising the Gly m 6 protein; a Jug n 4 protein, or a food source comprising the Jug n 4 protein; and/or a Jug r 4 protein, or a food source comprising the Jug r 4 protein; optionally wherein the method does not comprise administering to the subject the Pis v 2 protein or a food source comprising the Pis v 2 protein. Provided herein is a method of treating an allergy to a Pis v 3 protein, or a food source comprising the Pis v 3 protein, in a subject in need thereof, the method comprising administering to the subject: a Ses i 3 protein, or a food source comprising the Ses i 3 protein; a Pin k 2 protein, or a food source comprising the Pin k 2 protein; an Ana o 1 protein, or a food source comprising the Ana o 1 protein; a Car i 2 protein, or a food source comprising the Car i 2 protein; and/or a Cor a 11 protein, or a food source comprising the Cor a 11 protein; optionally wherein the method does not comprise administering to the subject the Pis v 3 protein or a food source comprising the Pis v 3 protein. Provided herein is a method of treating an allergy to a Pru du 6 protein, or a food source comprising the Pru du 6 protein, in a subject in need thereof, the method comprising administering to the subject: a Ses i 6 protein, or a food source comprising the Ses i 6 protein; a Ses i 7 protein, or a food source comprising the Ses i 7 protein; a Ber e 2 protein, or a food source comprising the Ber e 2 protein; a Fag e 1 protein, or a food source comprising the Fag e 1 protein; a Fag t 13s g protein, or a food source comprising the Fag t 13s g protein; a Sin a 2 protein, or a food source comprising the Sin a 2 protein; an Ana o 2 protein, or a food source comprising the Ana o 2 protein; an Ara h 3 protein, or a food source comprising the Ara h 3 protein; a Car i 4 protein, or a food source comprising the Car i 4 protein; a Cor a 9 protein, or a food source comprising the Cor a 9 protein; a Gly m 6 protein, or a food source comprising the Gly m 6 protein; a Jug n 4 protein, or a food source comprising the Jug n 4 protein; a Jug r 4 protein, or a food source comprising the Jug r 4 protein; a Pis v 2 protein, or a food source comprising the Pis v 2 protein; and/or a Pis v 5 protein, or a food source comprising the Pis v 5 protein; optionally wherein the method does not comprise administering to the subject the Pru du 6 protein or a food source comprising the Pru du 6 protein. Provided herein is a method of treating an allergy to a Ses i 3 protein, or a food source comprising the Ses i 3 protein, in a subject in need thereof, the method comprising administering to the subject: a Len c 1 protein, or a food source comprising the Len c 1 protein; a Lup an 1 protein, or a food source comprising the Lup an 1 protein; a Pis s 1 protein, or a food source comprising the Pis s 1 protein; a Pis s 2 protein, or a food source comprising the Pis s 2 protein; an Ana o 1 protein, or a food source comprising the Ana o 1 protein; an Ara h 1 protein, or a food source comprising the Ara h 1 protein; a Car i 2 protein, or a food source comprising the Car i 2 protein; a Jug r 2 protein, or a food source comprising the Jug r 2 protein; and/or a Pis v 3 protein, or a food source comprising the Pis v 3 protein; optionally wherein the method does not comprise administering to the subject the Ses i 3 protein or a food source comprising the Ses i 3 protein. Provided herein is a method of treating an allergy to a Ses i 6 protein, or a food source comprising the Ses i 6 protein, in a subject in need thereof, the method comprising administering to the subject: a Ber e 2 protein, or a food source comprising the Ber e 2 protein; a Fag t 13s g protein, or a food source comprising the Fag t 13s g protein; an Ana o 2 protein, or a food source comprising the Ana o 2 protein; an Ara h 3 protein, or a food source comprising the Ara h 3 protein; a Car i 4 protein, or a food source comprising the Car i 4 protein; a Cor a 9 protein, or a food source comprising the Cor a 9 protein; a Jug n 4 protein, or a food source comprising the Jug n 4 protein; a Jug r 4 protein, or a food source comprising the Jug r 4 protein; a Pis v 2 protein, or a food source comprising the Pis v 2 protein; a Pis v 5 protein, or a food source comprising the Pis v 5 protein; and/or a Pru du 6 protein, or a food source comprising the Pru du 6 protein; optionally wherein the method does not comprise administering to the subject the Ses i 6 protein or a food source comprising the Ses i 6 protein. Provided herein is a method of treating an allergy to a Ses i 7 protein, or a food source comprising the Ses i 7 protein, in a subject in need thereof, the method comprising administering to the subject: a Ber e 2 protein, or a food source comprising the Ber e 2 protein; a Fag e 1 protein, or a food source comprising the Fag e 1 protein; a Fag t 13s g protein, or a food source comprising the Fag t 13s g protein; a Sin a 2 protein, or a food source comprising the Sin a 2 protein; an Ana o 2 protein, or a food source comprising the Ana o 2 protein; an Ara h 3 protein, or a food source comprising the Ara h 3 protein; a Car i 4 protein, or a food source comprising the Car i 4 protein; a Cor a 9 protein, or a food source comprising the Cor a 9 protein; a Gly m 6 protein, or a food source comprising the Gly m 6 protein; a Jug n 4 protein, or a food source comprising the Jug n 4 protein; a Jug r 4 protein, or a food source comprising the Jug r 4 protein; a Pis v 2 protein, or a food source comprising the Pis v 2 protein; a Pis v 5 protein, or a food source comprising the Pis v 5 protein; and/or a Pru du 6 protein, or a food source comprising the Pru du 6 protein; optionally wherein the method does not comprise administering to the subject the Ses i 7 protein or a food source comprising the Ses i 7 protein. Provided herein is a method of treating an allergy to a Sin a 2 protein, or a food source comprising the Sin a 2 protein, in a subject in need thereof, the method comprising administering to the subject: an Ana o 2 protein, or a food source comprising the Ana o 2 protein; a Car i 4 protein, or a food source comprising the Car i 4 protein; a Cor a 9 protein, or a food source comprising the Cor a 9 protein; a Jug n 4 protein, or a food source comprising the Jug n 4 protein; a Jug r 4 protein, or a food source comprising the Jug r 4 protein; a Pis v 5 protein, or a food source comprising the Pis v 5 protein; a Pru du 6 protein, or a food source comprising the Pru du 6 protein; and/or a Ses i 7 protein, or a food source comprising the Ses i 7 protein; optionally wherein the method does not comprise administering to the subject the Sin a 2 protein or a food source comprising the Sin a 2 protein. Provided herein is a method of treating an allergy to a Vig r 2 protein, or a food source comprising the Vig r 2 protein, in a subject in need thereof, the method comprising administering to the subject: an Ara h 1 protein, or a food source comprising the Ara h 1 protein; a Car i 2 protein, or a food source comprising the Car i 2 protein; a Gly m 5 protein, or a food source comprising the Gly m 5 protein; a Jug r 2 protein, or a food source comprising the Jug r 2 protein; a Len c 1 protein, or a food source comprising the Len c 1 protein; a Lup an 1 protein, or a food source comprising the Lup an 1 protein; a Lup a v protein, or a food source comprising the Lup a v protein; a Pis s 1 protein, or a food source comprising the Pis s 1 protein; and/or a Pis s 2 protein, or a food source comprising the Pis s 2 protein; optionally wherein the method does not comprise administering to the subject the Vig r 2 protein or a food source comprising the Vig r 2 protein.

[0045] Similarly, the disclosure also provides methods of treating an allergy to a first Tropomyosin family protein (e.g., a protein identified in FIG. 13), or a food source including the first Tropomyosin family protein, in a subject in need thereof. A contemplated method comprises administering to the subject a second Tropomyosin family protein that is cross-reactive with the first Tropomyosin family protein (e.g., a protein that in FIG. 13 is connected to the first Tropomyosin family protein by a line) or a food source including the second Tropomyosin family protein. The disclosure also provides methods of treating an allergy to a first Bet v 1 family protein (e.g., a protein identified in FIG. 14), or a food source including the first Bet v 1 family protein, in a subject in need thereof. A contemplated method comprises administering to the subject a second Bet v 1 family protein that is cross-reactive with the first Bet v 1 family protein (e.g., a protein that in FIG. 14 is connected to the first Bet v 1 family protein by a line) or a food source including the second Bet v 1 family protein.

[0046] In another aspect, provided herein is a method of treating an allergy to one or more of salmon, shrimp, prawn, crab, lobster, crayfish, mussel, scallop, oyster, clam, abalone, squid, octopus, and nautilus in a subject in need thereof, the method comprising administering to the subject a multiple allergen oral immunotherapy composition comprising two or more of salmon, shrimp, prawn, crab, lobster, crayfish, mussels, scallop, oyster, clam, abalone, squid, octopus, and/or nautilus, optionally wherein the multiple allergen oral immunotherapy composition does not comprise one or more of salmon, shrimp, prawn, crab, lobster, crayfish, mussels, scallop, oyster, clam, abalone, squid, octopus, and nautilus.

[0047] In another aspect, provided herein is a method of treating an allergy to salmon in a subject in need thereof, the method comprising administering to the subject a multiple allergen oral immunotherapy composition comprising one or more of shrimp, prawn, crab, lobster, crayfish, mussel, scallop, oyster, clam, abalone, squid, octopus, and nautilus, optionally wherein the multiple allergen oral immunotherapy composition does not comprise salmon.

[0048] In another aspect, provided herein is a method of treating an allergy to shrimp in a subject in need thereof, the method comprising administering to the subject a multiple allergen oral immunotherapy composition comprising one or more of salmon, prawn, crab, lobster, crayfish, mussel, scallop, oyster, clam, abalone, squid, octopus, and nautilus, optionally wherein the multiple allergen oral immunotherapy composition does not comprise shrimp.

[0049] In another aspect, provided herein is a method of treating an allergy to prawn in a subject in need thereof, the method comprising administering to the subject a multiple allergen oral immunotherapy composition comprising one or more of salmon, shrimp, crab, lobster, crayfish, mussel, scallop, oyster, clam, abalone, squid, octopus, and nautilus, optionally wherein the multiple allergen oral immunotherapy composition does not comprise prawn.

[0050] In another aspect, provided herein is a method of treating an allergy to crab in a subject in need thereof, the method comprising administering to the subject a multiple allergen oral immunotherapy composition comprising one or more of salmon, shrimp, prawn, lobster, crayfish, mussel, scallop, oyster, clam, abalone, squid, octopus, and nautilus, optionally wherein the multiple allergen oral immunotherapy composition does not comprise crab.

[0051] In another aspect, provided herein is a method of treating an allergy to lobster in a subject in need thereof, the method comprising administering to the subject a multiple allergen oral immunotherapy composition comprising one or more of salmon, shrimp, prawn, crab, crayfish, mussel, scallop, oyster, clam, abalone, squid, octopus, and nautilus, optionally wherein the multiple allergen oral immunotherapy composition does not comprise lobster.

[0052] In another aspect, provided herein is a method of treating an allergy to crayfish in a subject in need thereof, the method comprising administering to the subject a multiple allergen oral immunotherapy composition comprising one or more of salmon, shrimp, prawn, crab, lobster, mussel, scallop, oyster, clam, abalone, squid, octopus, and nautilus, optionally wherein the multiple allergen oral immunotherapy composition does not comprise crayfish.

[0053] In another aspect, provided herein is a method of treating an allergy to mussel in a subject in need thereof, the method comprising administering to the subject a multiple allergen oral immunotherapy composition comprising one or more of salmon, shrimp, prawn, crab, lobster, crayfish, scallop, oyster, clam, abalone, squid, octopus, and nautilus, optionally wherein the multiple allergen oral immunotherapy composition does not comprise mussel.

[0054] In another aspect, provided herein is a method of treating an allergy to scallop in a subject in need thereof, the method comprising administering to the subject a multiple allergen oral immunotherapy composition comprising one or more of salmon, shrimp, prawn, crab, lobster, crayfish, mussel, oyster, clam, abalone, squid, octopus, and nautilus, optionally wherein the multiple allergen oral immunotherapy composition does not comprise scallop.

[0055] In another aspect, provided herein is a method of treating an allergy to oyster in a subject in need thereof, the method comprising administering to the subject a multiple allergen oral immunotherapy composition comprising one or more of salmon, shrimp, prawn, crab, lobster, crayfish, mussel, scallop, clam, abalone, squid, octopus, and nautilus, optionally wherein the multiple allergen oral immunotherapy composition does not comprise oyster.

[0056] In another aspect, provided herein is a method of treating an allergy to clam in a subject in need thereof, the method comprising administering to the subject a multiple allergen oral immunotherapy composition comprising one or more of salmon, shrimp, prawn, crab, lobster, crayfish, mussel, scallop, oyster, abalone, squid, octopus, and nautilus, optionally wherein the multiple allergen oral immunotherapy composition does not comprise clam.

[0057] In another aspect, provided herein is a method of treating an allergy to abalone in a subject in need thereof, the method comprising administering to the subject a multiple allergen oral immunotherapy composition comprising one or more of salmon, shrimp, prawn, crab, lobster, crayfish, mussel, scallop, oyster, clam, squid, octopus, and nautilus, optionally wherein the multiple allergen oral immunotherapy composition does not comprise abalone.

[0058] In another aspect, provided herein is a method of treating an allergy to squid in a subject in need thereof, the method comprising administering to the subject a multiple allergen oral immunotherapy composition comprising one or more of salmon, shrimp, prawn, crab, lobster, crayfish, mussel, scallop, oyster, clam, abalone, octopus, and nautilus, optionally wherein the multiple allergen oral immunotherapy composition does not comprise squid.

[0059] In another aspect, provided herein is a method of treating an allergy to octopus in a subject in need thereof, the method comprising administering to the subject a multiple allergen oral immunotherapy composition comprising one or more of salmon, shrimp, prawn, crab, lobster, crayfish, mussel, scallop, oyster, clam, abalone, squid, and nautilus, optionally wherein the multiple allergen oral immunotherapy composition does not comprise octopus.

[0060] In another aspect, provided herein is a method of treating an allergy to nautilus in a subject in need thereof, the method comprising administering to the subject a multiple allergen oral immunotherapy composition comprising one or more of salmon, shrimp, prawn, crab, lobster, crayfish, mussel, scallop, oyster, clam, abalone, squid, and octopus, optionally wherein the multiple allergen oral immunotherapy composition does not comprise nautilus.

[0061] In another aspect, provided herein is a method of treating an allergy to one or more of cod, salmon, shrimp, and carp in a subject in need thereof, the method comprising administering to the subject a multiple allergen oral immunotherapy composition comprising two or more of cod, salmon, shrimp, and carp, optionally wherein the multiple allergen oral immunotherapy composition does not comprise one or more of cod, salmon, shrimp, and carp.

[0062] In another aspect, provided herein is a method of treating an allergy to cod in a subject in need thereof, the method comprising administering to the subject a multiple allergen oral immunotherapy composition comprising one or more of salmon, shrimp, and carp, optionally wherein the multiple allergen oral immunotherapy composition does not comprise cod.

[0063] In another aspect, provided herein is a method of treating an allergy to salmon in a subject in need thereof, the method comprising administering to the subject a multiple allergen oral immunotherapy composition comprising two or more of cod, salmon, shrimp, and carp, optionally wherein the multiple allergen oral immunotherapy composition does not comprise salmon.

[0064] In another aspect, provided herein is a method of treating an allergy to shrimp in a subject in need thereof, the method comprising administering to the subject a multiple allergen oral immunotherapy composition comprising two or more of cod, salmon, shrimp, and carp, optionally wherein the multiple allergen oral immunotherapy composition does not comprise shrimp.

[0065] In another aspect, provided herein is a method of treating an allergy to carp in a subject in need thereof, the method comprising administering to the subject a multiple allergen oral immunotherapy composition comprising two or more of cod, salmon, shrimp, and carp, optionally wherein the multiple allergen oral immunotherapy composition does not comprise carp.

[0066] In another aspect, provided herein is a method of treating an allergy to one or more of egg, milk, and cheese in a subject in need thereof, the method comprising administering to the subject a multiple allergen oral immunotherapy composition comprising two or more of egg, milk, and cheese, optionally wherein the multiple allergen oral immunotherapy composition does not comprise one or more of egg, milk, and cheese.

[0067] In another aspect, provided herein is a method of treating an allergy to egg in a subject in need thereof, the method comprising administering to the subject a multiple allergen oral immunotherapy composition comprising one or both of milk and cheese, optionally wherein the multiple allergen oral immunotherapy composition does not comprise egg.

[0068] In another aspect, provided herein is a method of treating an allergy to milk in a subject in need thereof, the method comprising administering to the subject a multiple allergen oral immunotherapy composition comprising one or both of milk and cheese, optionally wherein the multiple allergen oral immunotherapy composition does not comprise milk.

[0069] In another aspect, provided herein is a method of treating an allergy to cheese in a subject in need thereof, the method comprising administering to the subject a multiple allergen oral immunotherapy composition comprising one or both of milk and cheese, optionally wherein the multiple allergen oral immunotherapy composition does not comprise cheese.

[0070] In another aspect, provided herein is a method of treating an allergy to one or more of wheat, corn, barley, and oat in a subject in need thereof, the method comprising administering to the subject a multiple allergen oral immunotherapy composition comprising two or more of wheat, corn, barley, and oat, optionally wherein the multiple allergen oral immunotherapy composition does not comprise one or more of wheat, corn, barley, and oat.

[0071] In another aspect, provided herein is a method of treating an allergy to wheat in a subject in need thereof, the method comprising administering to the subject a multiple allergen oral immunotherapy composition comprising one or more of corn, barley, and oat, optionally wherein the multiple allergen oral immunotherapy composition does not comprise wheat.

[0072] In another aspect, provided herein is a method of treating an allergy to corn in a subject in need thereof, the method comprising administering to the subject a multiple allergen oral immunotherapy composition comprising two or more of wheat, corn, barley, and oat, optionally wherein the multiple allergen oral immunotherapy composition does not comprise corn.

[0073] In another aspect, provided herein is a method of treating an allergy to barley in a subject in need thereof, the method comprising administering to the subject a multiple allergen oral immunotherapy composition comprising two or more of wheat, corn, barley, and oat, optionally wherein the multiple allergen oral immunotherapy composition does not comprise barley.

[0074] In another aspect, provided herein is a method of treating an allergy to oat in a subject in need thereof, the method comprising administering to the subject a multiple allergen oral immunotherapy composition comprising two or more of wheat, corn, barley, and oat, optionally wherein the multiple allergen oral immunotherapy composition does not comprise oat.

[0075] In another aspect, provided herein is a method of identifying an antibody (for example, an IgE or IgG antibody), for example, an antibody useful for detection of a cross-reactive allergenic protein. A contemplated method comprises: (a) identifying a cross-reactive T-cell or B-cell epitope peptide within the cross-reactive allergenic protein; and/or (b) identifying an IgE or IgG antibody that binds to the identified cross-reactive T-cell or B-cell epitope peptide.

[0076] In certain embodiments, step (a) comprises: (i) identifying a T-cell or B-cell epitope peptide within a reference allergenic protein; (ii) identifying a T-cell or B-cell epitope within an other protein that is in the same protein domain family as the reference allergenic protein; and/or (iii) calculating pairwise identity and/or similarity between the T-cell or B-cell epitope peptide within the reference allergenic protein and the T-cell or B-cell epitope within the other protein, so as to determine whether the T-cell or B-cell from the other protein is cross-reactive to the T-cell or B-cell from the reference allergenic protein.

[0077] In certain embodiments, step (i) comprises: selecting a peptide within the reference allergenic protein; and calculating pairwise identity and/or similarity between the peptide and a known T-cell or B-cell epitope, so as to determine whether the peptide is a T-cell or B-cell epitope.

[0078] A contemplated method may, for example, comprise determining the MHC binding potential of a T-cell epitope and/or mapping the cross-reactive T-cell or B-cell epitope peptide to the full-length sequence of the cross-reactive allergenic protein.

[0079] A cross-reactive allergenic protein and/or a reference protein may, for example, be selected from the group consisting of a shrimp allergen, a cod allergen, a salmon allergen, a hen's egg allergen, a cow's milk allergen, a peanut allergen, a sesame allergen, a soy allergen, a pecan allergen, a cashew allergen, a hazelnut allergen, a walnut allergen, a pistachio allergen, an almond allergen, and a wheat allergen, or be selected from the group consisting of allergenic proteins listed in Tables 2, 4-7, and 10-12.

[0080] In certain embodiments, a contemplated protein family is selected from the group consisting of: Tropomyosin, EF hand family (Beta-parvalbumin), ATP:guanido phosphotransferase (Arginine Kinase), Triosephosphate isomerase, Fructose bisphosphate aldolase class I, Alpha/beta casein, Lipocalin, Kappa-casein, Transferrin, C-type lysozyme/alpha-lactalbumin family, Serum albumin, Enolase, Serpin serine protease inhibitor, Kazal-type serine protease inhibitor, Collagen, Lipoprotein, Prolamin superfamily, Cupin, Profilin, Bet v 1 family, Oleosin, Isoflavone reductase family, Plant defensin, 60S acidic ribosomal protein, Heat shock protein Hsp70, Fe/Mn superoxide dismutase, Papain-like cysteine protease, Thaumatin-like protein, Unclassified, GILT family, Hevein-like and class I/II chitinase, Zinc finger, C3HC4 type (RING finger), SCAI family, Peroxidase, Serpin serine protease inhibitor, Thionin, Thioredoxin, Transcription elongation factor 1, and Triosephosphate isomerase.

[0081] In another aspect, provided herein is an antibody, e.g., an IgE or IgG antibody, identified by a disclosed method.

[0082] In another aspect, provided herein is an antibody, e.g., an IgE or IgG antibody, to a cross-reactive epitope sequence selected from the group consisting of: SEQ ID NOs: 1-11742. In another aspect, provided herein is an antibody, e.g., an IgE or IgG antibody, to an epitope sequence listed in any one of Tables 13-23.

[0083] In another aspect, provided herein is a method for detecting the presence or amount of a cross-reactive allergenic protein. A contemplated method comprises: (a) providing an antibody to a cross-reactive B-cell or T-cell epitope sequence within the cross-reactive allergenic protein; (b) contacting a sample (e.g., a biological sample) that may have the cross-reactive allergenic protein under conditions sufficient to permit binding of the antibody; and/or (c) detecting binding of the antibody, thereby to identify the presence or amount of the cross-reactive allergenic protein.

[0084] In certain embodiments, a cross-reactive allergenic protein is a kiwifruit, prawn, kiwi, brazil nut, lobster, celery, coconut, crab, apple, buckwheat, clam, pear, lentil, mussel, tomato, garden pea, oyster, stone fruit (e.g., apricot, peach, cherry), yellow mustard, abalone, birch tree, mung bean, squid, alder tree, lupin, octopus, white oak tree, Korean pine, house dust mite, cockroach, or yellow fever mosquito cross-reactive allergenic protein.

[0085] A contemplated antibody may include, for example, an IgE or IgG antibody, for example, an IgE or IgG antibody contemplated herein, for example an IgE or IgG antibody that binds to a cross-reactive epitope sequence selected from the group consisting of: SEQ ID NOs: 1-11742. A contemplated antibody may, for example, be immobilized on a substrate.

[0086] In another aspect, provided herein is kit (for example, a detection kit) comprising six or more antibodies (for example IgE or IgG antibodies) contemplated herein, each bound to a solid support. In certain embodiments, a contemplated kit includes an IgE or IgG labeling reagent; a binding buffer; a wash buffer; a detection buffer; and/or instructions for use.

[0087] Exemplary solid supports or substrates include a membrane, a filter, a chip, a slide (such as a microscopic slide), an array (such as a microarray), a wafer, a fiber, a magnetic or a non-magnetic bead, a gel, a tubing, a plate (such as a microtiter plate), a microtiter strip, a polymer, a microparticle, a sphere, a microsphere, a nanosphere, a particle, a microparticle, a nanoparticle, or a capillary.

[0088] In another aspect, provided herein is a method for preparing a multiple allergen oral immunotherapy composition that is capable of treating an allergy to a reference allergenic protein that is not present in the multiple allergen oral immunotherapy. A contemplated method comprises: (a) identifying an other protein that is the same protein domain family as the reference allergenic protein; (b) calculating pairwise identity and/or similarity between an amino acid sequence (for example, a full-length amino acid sequence) of the reference allergenic protein and an other protein, so as to determine whether the other protein is cross-reactive to the reference allergenic protein; and/or (c) selecting the other allergenic protein as a component in the multiple allergen oral immunotherapy if the other protein is cross-reactive to the reference allergenic protein. Alternatively, a contemplated method may comprise selecting the reference allergenic protein as a component in the multiple allergen oral immunotherapy so as to treat an allergy to the other allergenic protein.

[0089] In certain embodiments, step (b) comprises: (i) providing a dataset comprising the amino acid sequence of the reference allergenic protein and the other protein; (ii) inputting the dataset into a computer readable medium; (iii) performing a bioinformatic step to calculate pairwise identity and similarity between the reference allergenic protein and the other protein; and/or (iv) identifying the other protein as cross-reactive to the reference allergenic protein based on pairwise identity and similarity between the reference allergenic protein and the other protein.

[0090] A bioinformatic step may, for example, comprise applying an algorithm to determine homology between the reference allergenic protein and the other protein based on pairwise identity and similarity, wherein the algorithm is selected from the group consisting of GAP, BESTFIT, FASTA, TFASTA, BLAST, BLASTP, TBLASTN, FASTDB, ALIGN, CLUSTALW, and CLUSTAL-Omega, including any version thereof. In certain embodiments, a bioinformatic step comprises applying an algorithm comprising (identity+similarity)/2 to determine a cross-reactivity score, for example, an other protein is considered cross-reactive to a reference allergenic protein if the other protein has a cross-reactivity score of ≥0.5 with respect to the reference allergenic protein. In certain embodiments, an other protein is considered cross-reactive to a reference allergenic protein if the other protein has ≥70% homology to the reference allergenic protein.

[0091] A contemplated method may, for example, comprise, prior to step (a), identifying the reference allergenic protein as a protein in an allergenic food source, and/or mapping the reference allergenic protein to a protein domain family. A contemplated method may, for example, comprise identifying a T-cell epitope peptide, a B-cell epitope peptide, and/or an MHC-binding epitope peptide in the allergenic protein that is cross-reactive to a T-cell epitope peptide, a B-cell epitope peptides and/or an MHC-binding epitope in the other protein. In certain embodiments, a contemplated method further comprises determining the MHC binding potential of the T-cell or B-cell peptide.

[0092] In certain embodiments, a contemplated protein family is selected from the group consisting of: Tropomyosin, EF hand family (Beta-parvalbumin), ATP:guanido phosphotransferase (Arginine Kinase), Triosephosphate isomerase, Fructose bisphosphate aldolase class I, Alpha/beta casein, Lipocalin, Kappa-casein, Transferrin, C-type lysozyme/alpha-lactalbumin family, Serum albumin, Enolase, Serpin serine protease inhibitor, Kazal-type serine protease inhibitor, Collagen, Lipoprotein, Prolamin superfamily, Cupin, Profilin, Bet v 1 family, Oleosin, Isoflavone reductase family, Plant defensin, 60S acidic ribosomal protein, Heat shock protein Hsp70, Fe/Mn superoxide dismutase, Papain-like cysteine protease, Thaumatin-like protein, Unclassified, GILT family, Hevein-like and class I/II chitinase, Zinc finger, C3HC4 type (RING finger), SCAI family, Peroxidase, Serpin serine protease inhibitor, Thionin, Thioredoxin, Transcription elongation factor 1, and Triosephosphate isomerase.

[0093] A reference protein and/or an other allergenic protein may, for example, be selected from the group consisting of a shrimp allergen, a cod allergen, a salmon allergen, a hen's egg allergen, a cow's milk allergen, a peanut allergen, a sesame allergen, a soy allergen, a pecan allergen, a cashew allergen, a hazelnut allergen, a walnut allergen, a pistachio allergen, an almond allergen, and a wheat allergen, or be selected from the group consisting of proteins listed in Tables 2, 4-7, and 10-12.

[0094] In another aspect, provided herein is a multiple allergen oral immunotherapeutic composition prepared by a disclosed method.

[0095] In another aspect, provided herein is a multiple allergen oral immunotherapy composition comprising: (a) three or more Cupin family proteins; and (b) a pharmaceutically acceptable excipient. In certain embodiments, upon administration of the oral immunotherapy composition to a subject having an allergy or at risk of having an allergy to one or more of the three or more Cupin family proteins, the subject has increased resistance to the protein as compared to treatment with one Cupin family protein alone; and/or is also treated for an allergy to a different Cupin family protein. In a contemplated composition, the three or more Cupin family proteins and/or the different Cupin family member are selected from the group consisting of proteins listed in Table 5 and Table 10. In certain embodiments, the Cupin family proteins are selected from Pru du 6, Gly m 5, Gly m 6, and Gly m Bd, and upon administration the subject is also effectively treated for a Pis s 1, a Pis s 2 allergy and/or has more effective treatment for a Jug n 4 protein allergy as compared to administering a treatment with Jug n 4 alone.

[0096] In another aspect, provided herein is a multiple allergen oral immunotherapy composition comprising: (a) three or more Tropomyosin family proteins; and (b) a pharmaceutically acceptable excipient. In certain embodiments, upon administration of the oral immunotherapy composition to a subject having an allergy or at risk of having an allergy to one or more of the three or more Tropomyosin family proteins, the subject has increased resistance to the protein as compared to treatment with one Tropomyosin family protein alone; and/or is also treated for an allergy to a different Tropomyosin family protein. In a contemplated composition, the three or more Tropomyosin family proteins and/or the different Tropomyosin family member are selected from the group consisting of proteins listed in Table 6 and Table 11.

[0097] In another aspect, provided herein is a multiple allergen oral immunotherapy composition comprising: (a) three or more Bet v 1 family proteins; and (b) a pharmaceutically acceptable excipient. In certain embodiments, upon administration of the oral immunotherapy composition to a subject having an allergy or at risk of having an allergy to one or more of the three or more Bet v 1 family proteins, the subject has increased resistance to the protein as compared to treatment with one Bet v 1 family protein alone; and/or is also treated for an allergy to a different Bet v 1 family protein. In a contemplated composition, the three or more Bet v 1 family proteins and/or the different Bet v 1 family member are selected from the group consisting of proteins listed in Table 7 and Table 12.

[0098] In another aspect, provided herein is an allergen immunotherapeutic composition. A contemplated composition comprises at least 4 peptides, wherein the at least 4 peptides are each (i) from 9 to 25 amino acids in length (for example 15 amino acids in length), (ii) selected from the group consisting of a T-cell epitope peptide, a B-cell epitope peptide, and an MHC-binding peptide, and/or (iii) derived from an allergenic protein in a protein family selected from the group consisting of Tropomyosin, EF hand family (Beta-parvalbumin), ATP:guanido phosphotransferase (Arginine Kinase), Triosephosphate isomerase, Fructose bisphosphate aldolase class I, Alpha/beta casein, Lipocalin, Kappa-casein, Transferrin, C-type lysozyme/alpha-lactalbumin family, Serum albumin, Enolase, Serpin serine protease inhibitor, Kazal-type serine protease inhibitor, Collagen, Lipoprotein, Prolamin superfamily, Cupin, Profilin, Bet v 1 family, Oleosin, Isoflavone reductase family, Plant defensin, 60S acidic ribosomal protein, Heat shock protein Hsp70, Fe/Mn superoxide dismutase, Papain-like cysteine protease, Thaumatin-like protein, Unclassified, GILT family, Hevein-like and class I/II chitinase, Zinc finger, C3HC4 type (RING finger), SCAI family, Peroxidase, Serpin serine protease inhibitor, Thionin, Thioredoxin, Transcription elongation factor 1, and Triosephosphate isomerase.

[0099] In certain embodiments, contemplated peptides are each derived from a protein listed in Tables 2, 4-7, and 10-12. In certain embodiments, contemplated peptides each comprise, consist essentially of, or consist of the amino acid sequence of any one of SEQ ID NOs: 1-11742. In certain embodiments, contemplated peptides each comprise, consist essentially of, or consist of peptide sequences listed in any one of Tables 13-23.

[0100] A contemplated composition may, for example, be formulated for oral, parenteral, nasal, or topical administration.

### BRIEF DESCRIPTION OF THE DRAWINGS

[0101] FIG. 1 is a schematic depiction of an exemplary method for identification of cross-reactive allergenic proteins.

[0102] FIG. 2 is a schematic depiction of an exemplary allergenic map for a food source (“AllerMap”). All allergenic proteins present in a food source, all protein families to which these allergenic proteins belong, and all cross-reactive allergenic proteins not in the food source may be identified, for example, as described in FIG. 1. Then, all allergenic proteins in the food source and cross-reactive allergenic proteins may be assembled into an allergenic map for that food source. One or more AllerMaps may be used to create an allergenic profile of a subject.

[0103] FIG. 3 is a schematic depiction of an exemplary method for identification of cross-reactive epitopes, e.g., MHC-binding T-cell epitopes and B-cell epitopes that are shared by or common to allergenic proteins within a protein family.

[0104] FIG. 4 is a 2-dimensional matrix illustrating the homology and cross-reactivity between any two full-length proteins (based on amino acid sequence) within the Cupin protein family. Minimal homology observed was 14%. The size of the dots is indicative of the homology and the cross-reactivity between any protein pair.

[0105] FIG. 5 is a 2-dimensional matrix illustrating the homology and cross-reactivity between any two full-length proteins (based on amino acid sequence) within the Tropomyosin protein family. Minimal homology observed was <50%. The size of the dots is indicative of the homology and the cross-reactivity between any protein pair.

[0106] FIG. 6 is a 2-dimensional matrix illustrating the homology and cross-reactivity between any two full-length proteins (based on amino acid sequence) within the Bet v 1 protein family. Minimal homology observed was 28%. The size of the dots is indicative of the homology and the cross-reactivity between any protein pair.

[0107] FIG. 7 is a 2-dimensional matrix illustrating the homology and cross-reactivity between any two full-length proteins (based on amino acid sequence) within the Profilin protein family. Minimal homology observed was >about 23%. The size of the dots is indicative of the homology and the cross-reactivity between any protein pair.

[0108] FIG. 8 is a 2-dimensional matrix illustrating the homology and cross-reactivity between any two full-length proteins (based on amino acid sequence) within the EF Hand protein family. Minimal homology observed was >50%. The size of the dots is indicative of the homology and the cross-reactivity between any protein pair.

[0109] FIGS. 9A-9E depict an MHC-II-binding T-cell epitope cluster alignment for each of the indicated allergenic proteins present in the Cupin protein family. The X-axis corresponds to full-length amino acid sequence. Regions to which the MHC-II binding T-cell epitopes align are indicated. Alignment was performed using BlastP algorithm.

[0110] FIGS. 10A-10V depict an MHC-II-binding T-cell epitope cluster alignment for each of the indicated allergenic proteins present in the Tropomyosin protein family. The X-axis corresponds to full-length amino acid sequence. Regions to which the MHC-II binding T-cell epitopes align are indicated. Alignment was performed using BlastP algorithm.

[0111] FIGS. 11A-11D depict an WIC-II-binding T-cell epitope cluster alignment for each of the indicated allergenic proteins present in the Bet v 1 protein family. The X-axis corresponds to full-length amino acid sequence. Regions to which the MHC-II binding T-cell epitopes align are indicated. Alignment was performed using BlastP algorithm.

[0112] FIGS. 12A-12EE depict Circos plots that represent cross-reactive MHC-II-binding T-cell epitopes shared by various proteins within the Cupin protein family. A line originating from one protein radiating to another protein indicates cross-reactive MHC-II-binding T-cell epitopes that are shared by the two proteins. FIG. 12EE depicts a map of cross-reactivity of all Cupin protein family members.

[0113] FIG. 13A-1311 depict Circos plots that represent cross-reactive MHC-II-binding T-cell epitopes shared by various proteins within the Tropomyosin protein family. A line originating from one protein radiating to another protein indicates cross-reactive MHC-II-binding T-cell epitopes that are shared by the two proteins.

[0114] FIG. 14A-14BB depict Circos Plots that represent cross-reactive MHC-II-binding T-cell epitopes shared by various proteins within the Bet v 1 protein family. A line originating from one protein radiating to another protein indicates cross-reactive MHC-II-binding T-cell epitopes that are shared by the two proteins.

### DETAILED DESCRIPTION

[0115] Food allergy diagnosis remains challenging. Most standard methods are unable to differentiate sensitization from clinical allergy and cross-reactivity confounds diagnosis of allergies in many subjects. In many cases clinicians and allergists are unable to make a final diagnosis due to the presence of unidentified cross-reactivity between allergens. Much of the efforts in the prevention and/or treatment of allergies and intolerance to foods have focused on individual allergenic foods (e.g., peanuts) wherein vaccines and diagnostics are directed to allergens in a single food source (e.g., ara h1 or ara h 2 allergenic proteins in peanuts). Response to allergens are also typically focused on IgE antibodies that bind to epitopes on single allergens. The ability to identify cross-reactive allergenic proteins to, and between, allergenic food proteins would greatly aid in the design of various tests and immunotherapeutics for treatment and prevention of allergies and food intolerance in subjects. Identifying cross-reactive epitopes would also aid in the development of diagnostic tests, vaccines, peptide therapies, and specific antibodies which bind to such cross-reactive epitopes.

[0116] Accordingly, the disclosure relates, in part, to in silico methods for identification of cross-reactive allergenic proteins. A cross-reactive allergenic protein may be any allergenic protein that has cross-reactivity with at least one other allergenic protein. In the context of the present disclosure, an other allergenic protein is typically a protein in an allergenic source (e.g., an allergenic food source) to which a subject may be allergic and typically belongs to the same protein family as its cross-reactive allergenic counterpart. In some cases, a cross-reactive allergenic protein is an allergenic protein that is cross-reactive with an allergenic protein present in a whole food source that is included in a multiple allergen oral immunotherapeutic composition.

[0117] The disclosure also relates, in part, to in silico methods for identification of allergenic cross-reactive epitopes. Cross-reactive epitopes are epitopes that are shared by, or common to, two or more allergenic proteins, one of which may be an allergenic protein present in a food source of interest, for example, a food source present in a multiple allergen oral immunotherapeutic composition. Allergenic cross-reactive epitopes can be mapped to cross-reactive allergenic proteins and allergenic proteins of interest that, for example, are present in a food source or an immunotherapeutic composition. Allergenic cross-reactive epitopes of the present disclosure include T-cell epitopes and other epitopes that bind to at least one Major Histocompatibility Complex (MHC)/Human Leukocyte Antigen (HLA) molecule, or variants thereof. Allergenic cross-reactive epitopes of the present disclosure also include B-cell epitopes. It is contemplated that certain MHC-II-binding T-cell epitopes identified by methods disclosed herein bind a large number of MHC-II molecules which may be advantageous in the development of immunotherapeutics. Allergenic cross-reactive epitopes may, for example, be used in development and preparation of vaccines, peptide therapies, or diagnostics.

[0118] The disclosure also relates, in part, to methods of mapping all food allergenic proteins in various protein families to other cross-reactive allergenic proteins to create an allergen map for each food source (an AllerMap). A contemplated AllerMap includes not only the allergenic proteins present in such foods but also all cross-reactive allergenic proteins in other food sources, and other allergenic sources such as inhalants, pollens, spores, etc. It is contemplated that such AllerMaps may, for example, serve as a ready reference for subjects, their families and caregivers, as well as clinicians, allergists, and other health professionals.

[0119] The disclosure also relates, in part, to methods, compositions, and kits for identifying, treating, preventing, and/or monitoring food allergies and/or food intolerances in subjects having or at risk of having such food allergies and/or food intolerances. Contemplated methods may, for example, take advantage of cross-reactivity between allergenic proteins in various foods as identified by methods of the present disclosure.

[0120] The disclosure also relates, in part, to multiple allergen compositions (for example, multiple allergen immunotherapeutic compositions). A multiple allergen composition may, for example, comprise two or more proteins or two or more whole food sources such that the multiple allergen composition comprises one or more allergenic proteins that contain cross-reactive epitopes shared by or common to one or more cross-reactive allergenic proteins that are present in other food allergens and/or non-food allergens. For example, it is contemplated that parallel tolerization to (i) allergens present in a multiple allergen compositions, and (ii) cross-reactive allergens that are not present in a multiple allergen composition, may be observed upon administration of the multiple allergen composition. A contemplated mixed allergen composition may, for example, increase the resistance of a subject to a cross-reactive allergen, thereby forestalling or reducing the sensitization or allergy development in the subject.

[0121] The disclosure also relates, in part, to peptides (for example, T cell epitope peptides) and compositions and kits including such peptides, and their use in the treatment of allergy.

[0122] The disclosure also relates, in part, to methods, compositions, and kits for identification and detection of specific binding partners (e.g., antibodies, B-cell receptor expressing cells, and the like) that bind to allergenic proteins, or epitopes within allergenic proteins (for example, epitopes identified by the methods disclosed herein, for example, epitopes that are present on two or more cross-reactive allergenic proteins). Contemplated binding partners may, for example, be useful in the detection or quantification of particular cross-reactive allergens or treatment of allergic disease.

### I. Definitions

[0123] As used herein, the terms “a,” “an,” and “the” include plural reference unless the context dictates otherwise.

[0124] As used herein, an “antigen” refers any immunogenic moiety or agent (generally a macromolecule) which can elicit an immunological response in an individual mediated by antibodies, specific immunologically-competent cells, or both. The term may be used to refer to an individual macromolecule or to a homogenous or heterogeneous population of antigenic macromolecules. An “allergen” is an antigen which can initiate a state of hypersensitivity, or which can provoke an immediate hypersensitivity reaction in an individual already sensitized to such an allergen. The term “allergenic antigen” may be used interchangeably herein with “antigen” as it pertains to allergens. Allergens are commonly proteins or chemicals bound to proteins which have the property of being allergenic; however, allergens can also include organic or inorganic materials derived from a variety man-made or natural sources such as plant materials, metals, ingredients in cosmetics or detergents, latexes, or the like. Allergens may have little or no intrinsic toxicity by themselves, but cause pathological conditions due to their ability to elicit an IgE-associated immunological response, and upon their subsequent exposure, due to ability to elicit IgE- and/or T-cell-dependent hypersensitivity reactions. As used herein, an allergen may refer to an allergenic food source (for example, a whole or complete food containing allergenic proteins) or may refer directly to an allergenic protein, as will be evident from its context. Exemplary allergens (food source and their allergenic protein) are discussed in further detail in the sections below.

[0125] As used herein, “primary allergen” refers to an allergenic source or an allergenic protein in an allergenic source (e.g., an allergenic food source) to which an individual, subject or a patient has an existing allergy.

[0126] As used herein, the term “antibody” is meant to refer to immunoglobulin molecules (e.g., any type, including IgG, IgE, IgM, IgD, and IgA, and any class, such as IgG1, IgG2, IgG3, IgG4, IgA1 and IgA2) isolated from nature or prepared by recombinant means or chemically synthesized. The terms “antibody” and “immunoglobulin” can be used interchangeably throughout the specification, unless indicated otherwise. As used herein, “antibody” includes any fragment and analog thereof. A “fragment” or “analog” of an antibody comprises at least the antigen-binding or variable regions of the antibody. Examples of antibody fragments/analogs include Fab, Fab′, F(ab)2, F(ab′)2, F(ab)3, Fv (typically the VL and VH domains of a single arm of an antibody), single-chain Fv (scFv), dsFv, Fd fragments (typically the VH and CH1 domain), and dAb (typically a VH domain) fragments; VH, VL, VhH, and V-NAR domains; minibodies, diabodies, triabodies, tetrabodies, and kappa bodies (see, e.g., Ill et al., Protein Eng 1997; 10: 949-57); camel or llama IgG; IgNAR; and multispecific antibody fragments formed from antibody fragments, and one or more isolated CDRs or a functional paratope, where isolated CDRs or antigen-binding residues or polypeptides can be associated or linked together so as to form a functional antibody fragment. Various types of antibody fragments have been described or reviewed in, e.g., Holliger and Hudson (2005) Nat. Biotechnol. 23:1126-1136; International (PCT) Patent Application Publication No. WO2005/040219; and U.S. Patent Application Publication Nos. 2005/0238646 and 2002/0161201.

[0127] As used herein, the term “affinity” refers to a measure of the strength of binding between two members of a binding pair, for example, an antibody and an epitope and an epitope and a MHC-I or II haplotype. Kd is the dissociation constant and has units of molarity. The affinity constant is the inverse of the dissociation constant. Affinity may be determined experimentally, for example by surface plasmon resonance (SPR) using commercially available Biacore SPR units (GE Healthcare) or in silico by methods such as those described herein. Affinity may also be expressed as an IC50 or inhibitory concentration 50, that concentration at which 50% of a ligand (e.g., a peptide) is displaced.

[0128] As used herein, the terms “specific binding” or “specifically binding,” for example, when used in reference to the interaction of an antibody and a protein or peptide or the interaction of an epitope and an MEW haplotype means that the interaction is dependent upon the presence of a particular structure (e.g., an antigenic determinant or epitope).

[0129] As used herein, the term “epitope” refers to one or several portions or antigenic determinants (which may define a linear or a conformational epitope) of an antigenic protein or peptide which is/are specifically recognized and bound by an antibody, IgE, IgG, IgM, IgA etc., or a portion thereof (Fab′, Fab2′, etc.) or a receptor presented at the cell surface of a B or T cell lymphocyte, and which is able, by such binding, to induce an immune response.

[0130] As used herein, the term “B-cell epitope” refers to a peptide sequence that is recognized and bound by a B-cell receptor. A B-cell epitope may be a linear peptide or may comprise several discontinuous sequences which together are folded to form a structural epitope.

[0131] As used herein, the term “T-cell epitope” refers to a peptide sequence that is recognized and bound by a major histocompatibility protein molecule or a variant thereof in a configuration recognized by a T-cell receptor. In particular embodiments, a T cell epitope is an epitope recognized by an MHC class II molecule, which includes a sequence of +/−9 amino acids which fits in the groove of the MHC II molecule. Within a peptide sequence representing a T cell epitope, the amino acids in the epitope may be numbered P1 to P9, amino acids N-terminal of the epitope may be numbered P-1, P-2 and so on, and amino acids C terminal of the epitope may be numbered P+1, P+2 and so on.

[0132] The terms “allergy”, “allergic diseases”, “allergic disorders”, “food intolerances” “epitope-sensitive disorder, conditions and/or diseases” as used herein refer to diseases characterized by hypersensitivity reactions of the immune system to specific substances called allergens (such as pollen, stings, inhalants, venom, drugs, or foods, for example, whole foods, allergenic proteins, T-cell epitopes, B-cell epitopes, and/or MHC-binding T-cell epitopes present in allergenic proteins). Allergy is the ensemble of signs and symptoms observed whenever atopic individual subjects encounter an allergen to which they have been sensitized, which may result in the development of various diseases and symptoms, in particular respiratory diseases and symptoms such as bronchial asthma, autoimmunity, urticaria, etc. “Hypersensitivity” is an undesirable (damaging, discomfort-producing and sometimes fatal) reaction produced in an individual upon exposure to an antigen to which it has become sensitized; “Immediate hypersensitivity” depends of the production of IgE antibodies and is therefore equivalent to allergy.

[0133] As used herein, “immune cell” refers to any immune cell capable of providing an immune response to immunogenic or antigenic stimuli, such as exposure to one or more immunogens or antigens or ensembles of antigens or allergens. Immune cells include, but are not limited to, lymphocytes, T-cells, B-cells, plasma cells, memory cells, dendritic cells, monocytes, macrophages, antigen presenting cells (APCs), neutrophils, basophils, eosinophils, granulocytes, mast cells or any other cells considered to be part of the immune system of an organism.

[0134] As used herein, the term “immune response” or “immunological response” includes T cell (cellular) mediated and/or B cell (humoral) mediated immune responses, or both cellular and humoral responses. In particular, the term “immune response” may include an IgE-mediated immune response (e.g., an allergic immune response). Exemplary immune responses include T cell responses, such as Th2 responses resulting in cytokine production and/or cellular cytotoxicity. In addition, the term “immune response” includes responses that are indirectly affected by T cell activation, e.g., antibody production (humoral responses) and activation of cytokine responsive cells, e.g., eosinophils or macrophages. Immune cells involved in immune responses include lymphocytes, such as T cells (CD4+, CD8+, Th1 and Th2 cells, memory T cells, regulatory T cells) and B cells; antigen presenting cells (e.g., professional antigen presenting cells such as dendritic cells, macrophages, B lymphocytes, Langerhans cells, and non-professional antigen presenting cells such as keratinocytes, endothelial cells, astrocytes, fibroblasts, and oligodendrocytes); natural killer (NK) cells; and myeloid cells, such as macrophages, eosinophils, mast cells, basophils, and granulocytes. A particular immune response includes the production of immunoglobulin (Ig) isotype antibodies or decreasing IgE antibodies.

[0135] As used herein, the term “major histocompatibility complex (MHC)” refers to MHC Class I (and/or HLA Class I) and MHC Class II (and/or HLA Class II) genes and the proteins encoded thereby. Molecules of the MHC bind small peptides and present them on the surface of cells for recognition by T-cell receptor-bearing T-cells. MHCs are both polygenic (there are several MHC/HLA Class I and MHC/HLA Class II genes) and polymorphic (there are multiple alleles of each gene). The terms MHC-I, MHC-II, MHC-1 and MHC-II are variously used herein to indicate these classes of molecules. Included are both classical and nonclassical MHC molecules. An MHC molecule is made up of multiple chains (alpha and beta chains) which associate to form a molecule. The MHC molecule contains a cleft which forms a binding site for peptides. Peptides bound in the cleft may then be presented to T-cell receptors. The term “MHC binding region” refers to the cleft region of the MHC molecule where peptide binding occurs. As used herein, the term “haplotype” refers to the HLA alleles found on one chromosome and the proteins encoded thereby. Haplotype may also refer to the allele present at any one locus within the MHC. Each class of MHC is represented by several loci: e.g., HLA-A (Human Leukocyte Antigen-A), HLA-B, HLA-C, HLA-E, HLA-F, HLA-G, HLA-H, HLA-J, HLA-K, HLA-L, HLA-P and HLA-V for class I and HLA-DRA, HLA-DRB1-9, HLA-, HLA-DQA1, HLA-DQB1, HLA-DPA1, HLA-DPB1, HLA-DMA, HLA-DMB, HLA-DOA, and HLA-DOB for class II. Mutations and other variations of WIC and HLA molecules are included within the scope of the present disclosure. The terms “HLA allele” and “MHC allele” are used interchangeably herein. HLA alleles are listed on the world wide web at hla.alleles.org/nomenclature/naming.html.

[0136] As used herein, the term “biological sample,” or “patient sample” refers to a sample obtained from an organism or components (e.g., cells, or bodily fluids) of an organism. The sample can be of any biological tissue or fluid. The sample may be a non-clinical sample or a clinical sample, which is a sample derived from a patient. Such samples include but are not limited to, whole blood, serum, plasma, sputum, blood cells (e.g., peripheral blood mononuclear cells (PBMC), T-cells, B-cells, basophils, etc.), immune cells, tissue samples, biopsy samples, urine, tears, peritoneal fluid, pleural fluid, breast duct fluid, breast exudate, breast milk, saliva, semen, mucous, lymph, cytosol, ascites, amniotic fluid, bladder washes, bronchioalveolar lavage, or cells therefrom. Patient samples may be fresh or frozen, and may be treated, e.g., with heparin, EDTA, citrate or any other suitable treatment known in the art.

[0137] As used herein, “treat”, “treating” and “treatment” mean the treatment of a disease in a subject, e.g., in a human. This includes: (a) inhibiting the disease, i.e., arresting its development; and (b) relieving the disease, i.e., causing regression of the disease state. Contemplated methods may reduce or eliminate allergic symptoms including, for example: eczema, asthma, atopic dermatitis, bronchospasm, cough, rhinorrhea, angioedema, gastric hypermotility, urticaria (hives), pruritis, fatigue, bradycardia, allergic rhinitis, allergic conjunctivitis, and/or hypotension.

[0138] As used herein, the terms “subject” and “patient” refer to an organism to be treated by the methods and compositions described herein. Such organisms preferably include, but are not limited to, mammals, e.g., human, a companion animal (e.g., dog, cat, or rabbit), or a livestock animal (for example, cow, sheep, pig, goat, horse, donkey, and mule, buffalo, oxen, or camel)). In certain embodiments, a subject is a pediatric subject (e.g., less than or equal to 18 years old).

[0139] Throughout the description, where compositions are described as having, including, or comprising specific components, or where processes and methods are described as having, including, or comprising specific steps, it is contemplated that, additionally, there are compositions of the present disclosure that consist essentially of, or consist of, the recited components, and that there are processes and methods according to the present disclosure that consist essentially of, or consist of, the recited processing steps.

[0140] In the application, where an element or component is said to be included in and/or selected from a list of recited elements or components, it should be understood that the element or component can be any one of the recited elements or components, or the element or component can be selected from a group consisting of two or more of the recited elements or components.

[0141] Further, it should be understood that elements and/or features of a composition or a method described herein can be combined in a variety of ways without departing from the spirit and scope of the present disclosure, whether explicit or implicit herein. For example, where reference is made to a particular compound, that compound can be used in various embodiments of compositions of the present disclosure and/or in methods of the present disclosure, unless otherwise understood from the context. In other words, within this application, embodiments have been described and depicted in a way that enables a clear and concise application to be written and drawn, but it is intended and will be appreciated that embodiments may be variously combined or separated without parting from the present teachings and disclosure. For example, it will be appreciated that all features described and depicted herein can be applicable to all aspects of the disclosure described and depicted herein.

[0142] It should be understood that the expression “at least one of” includes individually each of the recited objects after the expression and the various combinations of two or more of the recited objects unless otherwise understood from the context and use. The expression “and/or” in connection with three or more recited objects should be understood to have the same meaning unless otherwise understood from the context.

[0143] The use of the term “include,” “includes,” “including,” “have,” “has,” “having,” “contain,” “contains,” or “containing,” including grammatical equivalents thereof, should be understood generally as open-ended and non-limiting, for example, not excluding additional unrecited elements or steps, unless otherwise specifically stated or understood from the context.

[0144] It should be understood that the order of steps or order for performing certain actions is immaterial so long as the present disclosure remains operable. Moreover, two or more steps or actions may be conducted simultaneously.

[0145] The use of any and all examples, or exemplary language herein, for example, “such as” or “including,” is intended merely to illustrate better the present disclosure and does not pose a limitation on the scope of the disclosure unless claimed. No language in the specification should be construed as indicating any non-claimed element as essential to the practice of the present disclosure.

[0146] Unless otherwise indicated, all numbers expressing quantities of ingredients, reaction conditions, and so forth used in the specification and claims are to be understood as being modified in all instances by the term “about.” Accordingly, unless indicated to the contrary, the numerical parameters set forth in this specification and attached claims are approximations that may vary depending upon the desired properties sought to be obtained by the present disclosure. Where the use of the term “about” is before a quantitative value, the present disclosure also includes the specific quantitative value itself, unless specifically stated otherwise.

### II. METHODS OF IDENTIFYING CROSS-REACTIVE ALLERGENIC PROTEINS

[0147] FIG. 1 provides as an illustration of a work flow of an exemplary for identification of cross-reactive allergenic proteins of the present disclosure; FIG. 2 provides an illustrative cartoon of an exemplary allergen map of a food source containing identified allergenic proteins and cross-reactive allergenic proteins in the food source that can be prepared using the methods of the present disclosure; and FIG. 3 provides an illustration of work flow of an exemplary method for identification of cross-reactive epitopes (T-cell and B-cells) which can be mapped to the identified allergenic proteins present and cross-reactive allergenic proteins present in a food source. Thus, a specific allergenic protein can be correlated with other allergenic proteins with a protein family to provide cross-reactive allergenic proteins and cross-reactive epitopes. Further details on the methods for identification of cross-reactive allergenic proteins and MHC-binding T-cell epitopes follow.

### Identified or Reference Allergenic Proteins

[0148] Allergens originate from many different sources and can stimulate human immune system to produce immunoglobulin E (IgE) antibodies and/or are responsible for eliciting symptoms of allergy in sensitized individuals. Currently over one thousand such molecules have been identified and registered by the World Health Organization and International Union of Immunological Societies (WHO/IUIS). Allergy databases are useful resources for obtaining information on all known and putative allergenic proteins in food sources and there exist several databases that collect and curate information of all known allergens (e.g., meduniwien.ac.at/allfam, allergenonline.org, and allergen.org available on the world wide web, AllerBase, FAARP 2019, and the like).

[0149] One of skill in the art will recognize that a variety of standard methods and software tools are available for manipulation, extraction, querying and analysis of data stored in databases. By using the standardized database designs these tools can be readily used individually or in combinations.

[0150] In some embodiments, an allergen database such as the AllFam database, is screened using one or more bioinformatics steps to identify allergenic proteins present in one or more food sources. Each allergenic protein present in a food source can be identified and its protein sequence retrieved on a food source-by-food source basis or in batches or as individual protein sequences. In some embodiments, the allergen databases are screened manually. As another non-limiting example, all food sources listed in Table 1 were identified by screening allergen databases in a batch for information on allergens present in food source and information, including associated GenBank or SWISS-PROT ID identifiers or numbers, retrieved via FTP transfer and stored locally. These identifiers are used to screen the GenBank, SWISS-PROT databases and other protein databases to retrieve all amino acid sequences of the identified allergenic proteins. As a yet another example, FAARP database or Genbank can be screening using one or more bioinformatics tools (e.g., using FASTA algorithm to identify allergenic proteins in the database. Exemplary parameters can be: BLOSUM 50 matrix, gap penalty=12 gap, gap extension penalty=2, Z=2,000 and z=1.). As can be seen from Example 1, identified allergenic proteins of allergenic foods of Table 1 include the exemplary identified allergenic proteins are listed in Table 2. The present disclosure specifically provides that the methods disclosed herein identify allergenic proteins present in food sources provided as identified allergenic proteins in Table 1.

### Identified Protein Families and Additional Allergenic Proteins

[0151] The present disclosure further provides, for example, that each of the identified allergenic proteins present in an allergenic food (such as those in Table 1) can be mapped to its protein family. Information on the protein families to which these identified allergenic proteins belong are obtained from the curated and annotated databases provided above and those known and/or published in the art (e.g., Genbank, Swiss-prot, NCBI, AllFam, and the like). Thus, each identified allergenic protein can be mapped to a protein family to which it belongs (each an identified protein family) using one or more in silico bioinformatics methods. Protein families (or superfamilies, as applicable) may be based on Pfam domains of each allergenic protein (also referred to as protein domain family herein) identifying additional allergenic proteins. Amino acid sequences of all identified allergenic protein members of each such identified protein family as well as the additional allergenic proteins present in each of the identified protein family may be, for example, retrieved in a format that is conducive for bioinformatics manipulation and analyses in one or more bioinformatics steps to be performed in the methods disclosed here. For example, the amino acid sequences of all proteins in each of the identified proteins families to which the identified allergenic proteins belong are retrieved in FASTA format. As a non-limiting example, all identified allergenic proteins present in the exemplary food sources listed in Table 1 are provided in Table 2 (see also Example 1). One of skill in the art will appreciate that additional allergenic proteins may be, for example, present in other food sources, and other allergens such as inhalants, pollens, and the like that are not food sources. Thus, the methods of the present disclosure are useful in mapping identified allergenic proteins of Table 2 to additional allergenic proteins present in other non-food allergens and other food sources (See Table 8).

### Identification of Cross-Reactive Allergenic Proteins, in Silico Bioinformatics

[0152] To further evaluate the potential of the additional allergenic proteins within each protein family to be cross-reactive with one or more of the identified allergenic proteins also present in each of the identified protein family, each identified allergenic protein may be, for example, mapped to each of the additional allergenic proteins within its identified protein family as described herein. Typically, one or more full-length identified allergenic proteins in foods (such as those listed in Table 2) are mapped to full-length additional allergenic proteins within a protein family (such as those provided in Table 3). One of skill will recognize that isoforms may also be useful in the identification of cross-reactive allergenic proteins and can be included in the analyses.

[0153] In some embodiments, contemplated methods include mapping each identified allergenic protein in a family with each of the additional allergenic proteins within the same family. The mapping includes performing one or more in silico bioinformatics steps to determine the homology of one or more full-length identified allergenic protein to each full-length additional allergenic protein within a protein family (full-length homology), determining a cross-reactive score with respect to each additional allergenic protein and correlating one or more of the identified allergenic proteins with one or more of the additional allergenic proteins.

[0154] Each additional allergenic protein within a protein family may be, for example, correlated with one or more identified allergenic protein based on its homology and cross-reactivity score. Homology is based on pairwise identity and similarity of a pair of full-length protein sequences (an additional allergenic protein and an identified allergenic protein (“reference protein”). In some embodiments, the full-length homology of each of the allergenic protein sequences within a protein family (which includes one or more identified allergenic proteins within each protein family) with respect to each of the other allergenic proteins within the protein family are determined based on pairwise identity and similarity between the pair of full-length protein sequences. A homology score may be, for example, provided based on identity and similarity of the amino acids between each pair of protein sequences.

[0155] Contemplated in silico bioinformatics steps include the use of various bioinformatics tools, methods, algorithms etc. that compare sequences (e.g., pairwise), create multiple sequence alignments, etc. Methods and algorithms for alignment of sequences and for comparison of the sequences are well known in the art. Optimal alignment of sequences for comparison can be conducted, e.g., by the local homology algorithm of Smith and Waterman, Adv. Appl. Math. 2:482 (1981), by the homology alignment algorithm of Needleman and Wunsch, J. Mol. Biol. 48:443 (1970), by the search for similarity method of Pearson and Lipman, Proc. Nat'l. Acad. Sci. USA 85:2444 (1988), by computerized implementations of these algorithms (GAP, BESTFIT, FASTA, and TFASTA in the Wisconsin Genetics Software Package, Genetics Computer Group, 575 Science Dr., Madison, Wis.), or by manual alignment and visual inspection (see, e.g., Current Protocols in Molecular Biology (Ausubel et al. eds. 1995 supplement)). Default parameters may be used or alternative parameters may be used. Examples of algorithms that are suitable for determining percent sequence identity and sequence similarity are the BLAST and BLAST 2.0, FASTDB, or ALIGN, CLUSTALW, CLUSTAL-OMEGA algorithms, which are publicly available (e.g., NCBI: National Center for Biotechnology Information). Those skilled in the art can determine appropriate parameters for aligning sequences. For example, the BLASTN program (for nucleotide sequences) can use as defaults a wordlength (W) of 11, an expectation (E) of 10, M=5, N=−4, and a comparison of both strands. Comparison of amino acid sequences using BLASTP can use as defaults a wordlength (W) of 3, an expectation (E) of 10, and the BLOSUM62 scoring matrix (see Henikoff and Henikoff, 1989, Proc Natl Acad Sci USA. 89:10915-9). In case of the FASTA algorithm, the intent is to identify local alignments between a pair of sequences to find portions of two proteins that may describe the core areas of shared sequence and this local alignment is consistent with how epitopes tend to localized as small portions (clusters) within the larger intact protein sequence. FASTA as a tool has been used to evaluate sequences and a conservative metric of minimum 35% shared identity, plus a minimum of 80 amino acid overlap length has become the criteria to establish significant shared sequence between an unknown protein allergen and a known allergen. In some embodiments, sequence similarity and Identity are calculated by any method known in the art, for example, FASTA and other tools available at the SIAS server (available on the world wide web at imed.med.ucm.es/Tools/sias.html).

[0156] In connection with amino acid sequences, “sequence identity” refers to sequences which have the stated value when assessed using, for example, Clustal-OMEGA, an alignment engine for aligning profile hidden Markov models (HMIs) to each other instead of the conventional dynamic programing and profile alignment. Pairwise alignments may be, for example, performed using the k-tuple method, Sampling method: mBed to speed, Matrix: Gonnet PAM 250 matrix; gap open penalty: 6 bits, gap extension: 1 bit. mmultiple sequence alignment is produced using the HHalign package, which aligns two profile hidden Markov models (HMM). The guide tree may be, for example, next constructed using the UPGMA method (see Daugelaite et al. (2013) International Scholarly Research Notices, vol. 2013, Article ID 615630, and ebi.ac.uk/seqdb/confluence/display/THD/Help+-+Clustal+Omega+FAQ #Help-ClustalOmegaFAQ-top available on the world wide web).

[0157] A full-length homology of at least 70% over the full length of the pair of allergenic protein sequences is an exemplary acceptable minimum homology in the context of the present disclosure. In various embodiments, the minimum homology acceptable is at least: 70%, 71%, 72%, 73%, 74%, 75%, 76%, 77%, 78%, 79%, 80%, 81%, 82%, 83%, 84%, 85%, 86%, 87%, 88%, 89%, 90%, 91%, 92%, 93%, 94%, 95%, 96%, 97%, or 98% homologous to an identified allergenic protein (a reference protein) present in any of the food sources (such as those listed in Table 1) or another additional allergenic protein (also a reference protein).

[0158] In some embodiments, the methods for identification of cross-reactive allergenic proteins include one or more steps to determination a cross-reactivity score for each allergenic protein within a protein family with respect to an identified allergenic protein to predict cross-reactivity between two allergenic proteins (e.g., an additional allergenic protein and an identified allergenic protein, or one additional allergenic protein and another additional allergenic protein) and using a minimal acceptable cross-reactivity score for prediction of cross-reactivity between each pair of allergenic protein sequences.

[0159] Cross-reactivity score (an “A-RISC score”) may be calculated for each allergenic protein within a protein family of interest (e.g., Cupin, Tropomyosin, Bet v 1, Prolamin, Profilin, Lipid Transfer Protein, EF Hand, etc.) to predict cross-reactivity of an allergenic protein to another allergenic protein using an Allergens'-Relative Identity, Similarity and Cross-Reactivity (A-RISC) indexing algorithm as described in Chruszcz et al. (2018) PLoS One 13(11):e0208276 and as further described in Example 2. This cross-reactivity scoring method is based on the identity and similarity of each allergenic protein (for example, of amino acid sequence residues) with respect to a reference protein, which in the context of this disclosure is typically an identified allergenic protein or in some cases another additional allergenic protein within the same protein family or another identified allergenic food source (each a “reference protein”). The methods may, for example, include one or more bioinformatics steps to determine the cross-reactivity score for each allergenic protein within a protein family. Pairwise amino acid sequence comparison and/or multiple sequence alignment may be, for example, performed to determine the identity and similarity scores for each amino acid residue in the protein sequence for each allergenic protein as described above. Sequence similarities and identities may be, for example, calculated with SIAS (Immunomedicine Group: Tools >>SIAS (ucm.es)) using default parameters. The SIAS webpage divides the amino acids into the following similarity groups: aromatic, aliphatic, positively charged, negatively charged, small with hydroxyl group and neutral polar. A cross-reactivity scores may be, for example, categorized into 4 levels. A cross-reactivity scores may be, for example, categorized as low (A-RISC=≤0.25), medium-low (A-RISC=≥0.25), medium-high (A-RISC=≥0.5) and high (A-RISC=1) for likelihood of cross-reactivity between each additional allergenic protein and its reference protein (an identified allergenic protein or another additional allergenic protein in the same protein family).

[0160] FIGS. 4-7 provide exemplary result for the mapping of each additional allergenic protein in an indicated protein family with respect to other additional allergenic proteins within the same protein family. The 2-dimensional matrix indicates the degree of cross-reactivity between each protein pair within a protein family. Size of the dots in each matrix reflects the predicted cross-reactivity of each pair of protein sequences.

[0161] Each allergenic protein having a cross-reactivity score of ≥0.5 to 1 with respect to its reference protein using the methods disclosed herein may be, for example, identified as having cross-reactivity with its reference protein (e.g., an identified allergenic protein or another allergenic protein, as applicable) and may be, for example, identified as a cross-reactive allergenic protein. Accordingly, in some embodiments, the cross-reactive allergenic proteins identified using the methods of the present disclosure have a cross-reactivity score of ≥0.5-1. In some embodiments, the identified cross-reactive allergenic proteins will have a cross-reactivity score of ≥0.5. In some embodiments, the identified cross-reactive allergenic proteins may be stratified by their cross-reactivity score, for example, a cross-reactivity score of ≥0.5, ≥0.6, ≥0.65, ≥0.7, ≥0.75, ≥0.8, ≥0.85, ≥0.9, ≥0.95, ≥0.96, ≥0.97, ≥0.98, ≥0.99 or about 1. Such stratification may be desirable for selection of various identified cross-reactive allergenic proteins, for example, for using in therapeutics, for use in screening of immune response to cross-reactive allergenic proteins, for development of assays and tests for diagnosing, treating and monitoring a subject and/or progression (or remission or tolerization) of their allergies.

[0162] Examples of allergenic proteins in Cupin protein family that are cross-reactive with respect to other allergenic proteins within the Cupin protein family are provided in Table 10. Similarly, a non-exhaustive list of allergenic proteins in Tropomyosin and Bet v1 protein families with respect to other allergenic proteins within their respective protein families are provided in Tables 11 and 12. One of skill will appreciate an identified allergenic protein which serves as a reference protein to a cross-reactive allergenic protein is itself a cross-reactive allergenic protein with respect to that cross-reactive allergenic protein. By way of example, Ber e2, a Cupin family additional allergenic protein is cross-reactive to the identified allergenic protein ara h3 and by the same token, ara h3 the identified allergenic protein present in peanuts is cross-reactive to Ber e2 which is the reference protein with respect to ara h3.

[0163] Accordingly, the additional allergenic proteins having a cross-reactivity score of ≥0.5 with respect to an identified allergenic protein (e.g., such as those present in Table 2) or another additional allergenic protein within its protein family are identified as cross-reactive allergenic proteins with respect to the identified allergenic protein or the another additional allergenic protein within the same protein family. In certain embodiments, the identified cross-reactive allergenic proteins are at least 70% homologous to or have a cross-reactivity score of ≥0.5 with respect to an identified allergenic protein listed in Table 2. In certain embodiments, the identified cross-reactive allergenic proteins are at least 80% homologous to or have a cross-reactivity score of ≥0.75 with respect to an allergenic protein listed in Table 2.

[0164] These identified cross-reactive allergenic proteins with a cross-reactivity score of ≥0.5 and homology of at least 70% may be, for example, co-recognized with an identified allergenic protein and may be, for example, predicted to induce immune response in an individual, a biological sample or a cell. More stringently cutoffs may be used as desired.

[0165] Thus, the present disclosure provides that allergenic proteins in various food sources (including those used in multiple allergen oral immunotherapy) may be identified and mapped to additional allergenic proteins in a protein family using in or more in silico bioinformatics steps, which may include, for example, determining the homology of, and cross-reactivity score for, each additional allergenic protein as disclosed herein and correlating it with respect to its reference protein, e.g., an identified allergenic proteins to identify cross-reactive allergenic proteins. Cross-reactive allergenic proteins identified by the methods of the present disclosure may be, for example, further tested in vitro using bioassays described herein.

[0166] One of skill in the art will appreciate that the methods disclosed herein are not limited to identification of cross-reactivity to only identified allergenic proteins of Table 2 and that the methods disclosed herein can be used to identify cross-reactive allergenic proteins to allergenic proteins present in any allergenic food source which can serve as reference proteins for identification of cross-reactive allergenic proteins. One of skill in the art will also appreciate that identified cross-reactive allergenic proteins are also present in non-food allergens and thus subjects having an allergy or food-intolerance to a food allergen may be based on cross-reactivity to one or more allergenic proteins in the food may have another allergy which can be to another food that is not listed in Table 1 or it can be to a non-food allergen (such dust mites, cat allergens, and the like) and cross-reactive allergenic proteins contained therein.

[0167] Identification of cross-reactive allergenic proteins using the methods disclosed here reveal the potential for individuals consuming food sources that include any one or more identified cross-reactive allergenic proteins to become allergic to such food sources. Thus, one of skill in the art will recognize that the utility of the methods disclosed herein to identify and map additional cross-reactive allergenic proteins. In the context of the present disclosure, a food allergenic protein thus may be, for example, a plant allergenic protein or an animal allergenic protein. For example, the food allergenic protein may be one or more allergenic protein from: a legume (e.g., peanut, soybean, green pea, lentils, mung beans); a tree (e.g., pine, birch, alder, oak, hazel, hornbeam, willow, poplar, plantanus, tilia, olea); a tree nut (e.g., pecan, hazelnut, almond, pistachio, brazil nut, English walnut, European chestnut, cashew); a drupe (e.g., coconut); a cereal (e.g., wheat, corn, barley, oat); a grass (e.g., ryegrass, timothy-grass); a weed (e.g., ragweed, plantoago, nettle, Atemesia, vulgaris, Chenopodium album, sorrel); a fruit (e.g., tomato, apple, banana, apricot, rice, avocado, apricot, plum, cherry, each, pear, strawberry, kiwi, pineapple); a vegetable (e.g., celery, potato; eggplant); an allergen from a seed (e.g., sesame, buckwheat, mustard); a flower (e.g., lupin); an allergen from a fish (e.g., cod, salmon, carp); a crustacean (e.g., shrimp, prawns, crab, lobster, crayfish); a mollusk (e.g., mussels, scallops, oysters, clams, abalone); a cephalopod (e.g., squid, octopus, nautilus); poultry (e.g., chicken, duck), a dairy product (e.g., egg, milk, cheese); etc. Allergenic proteins present in any of these food sources or others known in the art may be obtained and cross-reactive allergenic proteins may be identified using the methods disclosed herein. Further, the methods disclosed herein can be used for identification of cross-reactive allergenic proteins to allergenic proteins from non-food sources, such as inhalants, animals, dust mites, cats etc.

### III. EPITOPES

[0168] Adaptive and humoral immune responses to an allergenic antigens are dependent on the binding of T-cell epitopes and/or B-cell epitopes to WIC molecules via presentation of the MHC-bound epitope complexes at the cell surface of antigen presenting cells, and recognition of those complexes by effector or T-reg cells, an interaction that can be evaluated in WIC or HLA binding assays and in in-vitro T-cell assay and/or by B-cells. A number of WIC-binding motif-based tools that permit scanning of protein sequences for potential T-cell epitopes are known in the art. The methods of the present disclosure can be used, for example, to analyze, identify and provide cross-reactive epitopes comprising B-cell epitopes and/or peptides that bind to one or more members of an WIC or HLA superfamily (e.g., T-cell epitopes) from a variety of sources. The identified cross-reactive epitopes may, for example, immune response in a subject, a biological sample or a cell upon exposure to such epitopes or proteins comprising such epitopes.

[0169] The present disclosure provides that cross-reactive epitopes may be, for example, shared by or common to one or more identified allergenic proteins in a food source as well as in additional allergenic proteins that are cross-reactive with such one or more identified allergenic proteins. In some embodiments, the cross-reactive epitopes may be conserved in the entire protein family containing allergenic proteins. As used herein, “shared by” or “common to” with respect to cross-reactive epitopes refers to epitopes peptides sequences that are either identical between the one or more identified allergenic proteins and one or more of cross-reactive allergenic proteins. are nearly identical (e.g., conserved), or have sufficient homology as to permit at least weak binding or co-recognition of the one or more identified allergenic proteins and one or more of cross-reactive allergenic proteins.

[0170] The present disclosure is not limited to use of full-length sequences of allergenic proteins; shorter isoforms of such allergenic proteins and partial sequences of allergenic proteins are also useful for the identification of cross-reactive epitopes, e.g., 30%, 40%, 50%, 60%. 70%, 80%, 90% or 95% of the full-length sequences. Indeed, the methods of the present disclosure may be, for example, applied to sequences in an entire protein family containing one or more allergenic proteins or the methods may, for example, be applied to certain subset of allergenic proteins, which include one or more identified allergenic proteins present in a food source and one or more additional allergenic protein or one or more cross-reactive allergenic proteins identified by the methods of the present disclosure.

[0171] Cross-reactivity can be between allergenic proteins or epitopes present in one or more food sources or cross-reactivity between one or more allergenic proteins or epitopes present in a food source and one or more cross-reactive allergenic proteins or epitopes present in a non-food source. Non-limiting examples of sources of allergenic protein sequences that can be a source for identification of cross-reactive epitopes are provided in Table 1 (food sources) and Table 8.

[0172] In some embodiments, the source of cross-reactive epitopes is one or more of identified protein families (for example, to which one or more identified allergenic proteins belong). Exemplary identified protein families include: Tropomyosin, EF hand family (Beta-parvalbumin), ATP:guanido phosphotransferase (Arginine Kinase), Triosephosphate isomerase, Fructose bisphosphate aldolase class I, Alpha/beta casein, Lipocalin, Kappa-casein, Transferrin, C-type lysozyme/alpha-lactalbumin family, Serum albumin, Enolase, Serpin serine protease inhibitor, Kazal-type serine protease inhibitor, Collagen, Lipoprotein, Prolamin superfamily, Cupin, Profilin, Bet v 1 family, Oleosin, Isoflavone reductase family, Plant defensin, 60S acidic ribosomal protein, Heat shock protein Hsp70, Fe/Mn superoxide dismutase, Papain-like cysteine protease, Thaumatin-like protein, Unclassified, GILT family, Hevein-like and class I/II chitinase, Zinc finger, C3HC4 type (RING finger), SCAI family, Peroxidase, Serpin serine protease inhibitor, Thionin, Thioredoxin, Transcription elongation factor 1, Lipid transfer protein, and Triosephosphate isomerase protein families. Exemplary identified allergenic proteins include the allergenic proteins listed in Table 2. In some embodiments, the source of cross-reactive epitopes is one or more cross-reactive allergenic proteins selected from those listed in Table 4. In some embodiments, the source of cross-reactive epitopes is one or more of allergenic proteins present in the Cupin protein family (such as those listed in Table 5). In some embodiments, the source of cross-reactive epitopes is one or more cross-reactive allergenic proteins within the Cupin protein family. In some embodiments, the source of MHC-binding T-cell epitopes and B-cell epitopes are Ber_e_2, Car_i_2, Fag_e_1, Fag_e_13S, Fag_t_13S_globulin, Jug_n_4, Lup_a_vicilin, Lup_an_1, Pin_k_2, Pis_s_1, Pis_s_2, Pis_v_2, Ses_i_3, Ses_i_6, Ses_i_7, Sin_a_2, Vig_r_2, Car_i_4, Gly_m_5, Gly_m_6, Jug_r_4, Len_c_1, and/or Pru_du_6.

### Cross-Reactive Epitopes

[0173] The Immune Epitope Database (Zhang et al. 2008, Nucleic Acids Res. 36:W513-W518) provides a registry of all currently known epitope sequences. Several T-cell epitope prediction tools for the identification and selection of T-cell epitopes from such allergenic and cross-reactive allergenic proteins for use in the context of the present disclosure are known in the art (De Groot and Moise. Current Opinion in Drug Discovery & Development 2007, 10(3)) and a majority of allergenic proteins have been cloned and sequenced (see allergen.org available on the world wide web, a register of validated data maintained by the Allergen Nomenclature Sub-committee of the World Health Organization and International Union of Immunological Societies (TUTS)). Validated T-cell epitope mapping tools include EpiMatrix (EpiVax Inc.), SYFPEITHI (Univ. of Tubingen; syfpeithi.de/home.htm available on the world wide web), MHC Thread (Hebrew University), MHCPhred (Edward Jenner Inst. For Vaccine Research, jenner.ac.uk/MHCPred available on the world wide web), EpiJen (Edward Jenner Inst. For Vaccine Research), NetMHC (Inst. Of Medical Microbiology And Immunology), NetCTL (Inst. Of Medical Microbiology and Immunology), MHC-I/MHC-II binding (IEDB), nHLAPred (Inst. Of Microbial Technology), SVMHC (Univ of Tubingen, bs.informatik.uni-tuebingen.de/SVMHC available on the world wide web), and Bimas (NIH). These algorithms allow prediction within a protein of one or more nonapeptide sequences which will fit into the groove of an MHC II molecule.

[0174] IEDB, AntiJen, and B-cell oriented databases such as BciPep, Epitome, and SDAP are known B-cell epitope databases useful in the context of the present disclosure. Various B-cell epitope mapping tools for the prediction of linear B-cell epitopes from protein sequence including amino acid scales and HMIs, DiscoTope, ElliPro, Paratome, and PIGS are available from IEDB. Other useful B-cell epitope mapping tools are known in the art (see Potocnakova et al. (2016) J. Immunol Res. Volume 2016, Article ID 6760830).

[0175] Accordingly, the present disclosure further provides in silico methods for identifying one or more epitopes that are cross-reactive, e.g., are shared by or common to one or more identified allergenic proteins and one or more cross-reactive allergenic proteins (or shared by or common to at least two proteins within a protein family).

[0176] The in silico bioinformatic methods of the present disclosure may include, for example, performing one or more bioinformatics steps to map or link the experimentally-validated T-cell epitopes and/or B-cell epitopes to all the proteins present within an identified protein family (which includes one or more identified allergenic proteins and all additional allergenic proteins within the protein family) in an unsupervised manner to eliminate selection bias at the protein family and epitope level.

[0177] In some cases, it may be desirable to identify T-cell and/or B-cell epitopes only on one or more cross-reactive allergenic proteins (e.g., additional allergenic proteins that are cross-reactive (having a cross-reactivity score of ≥0.5, and/or having a homology score of ≥70%) with one or more allergenic proteins (e.g., an identified allergenic protein from a food source) within a protein family). Accordingly, in some embodiments, the in silico methods of the present disclosure include performing one or more bioinformatics steps to map or link the experimentally-validated T-cell epitopes and/or B-cell epitopes to one or more (or all) identified cross-reactive allergenic proteins in allergenic foods within each identified protein family (such as those in Tables 4-7 (Tropomyosin, Prolamin, EF Hand, Profilin, etc.) to which one or more identified allergenic proteins belong.

[0178] To identify T-cell and/or B-cell epitopes in these cases, in some embodiments, the full-length proteins within each identified protein family e.g., Cupin protein family, that includes all allergenic proteins, or a subset of allergenic proteins within a protein family as described above may be chosen as a dataset. Typically, however the entire dataset containing all protein family members are analyzed unsupervised to avoid bias. Experimentally validated T-cell epitopes, and/or B-cell epitopes from a source of experimentally-validated epitopes (such as IEDB) are retrieved and stored locally. A plurality of T-cell epitopes and/or a plurality of B-cell epitopes are probed with a plurality of peptides generated from the allergenic proteins using one or more bioinformatics steps that would include use of bioinformatics tools, algorithms etc.

[0179] Contemplated methods may, for example, include one or more in silico bioinformatics steps, wherein peptides (K-mers) are generated from each allergenic protein within a protein family (e.g., Cupin, Tropomyosin, Prolamin, Lipid transfer protein, Bet v 1, EF hand, and the like, which include one or more identified allergenic protein sequences listed in Table 2). Algorithms for generating overlapping peptides are known in the art (e.g., PepSequencer from JPT Innovative Tools). Peptides (K-mers), in the context of the present disclosure, are generally 5-200 amino acids long (5 mer-200-mer) with a sliding window of 1-5 amino acids. In some embodiments, peptide K-mers are 8-150 amino acids long (8 mer-150-mer) with a sliding window of 1-5 amino acids. In some embodiments, the peptides are overlapping peptides of length ranging from 9-mer to 200-mer with a sliding window of 1-5 amino acids. In other embodiments, the peptide K-mers are 20-mers with a sliding window of 1-5 amino acid. In at least one embodiment, the peptide K-mer is a 14 mer with a sliding window of 1-5 amino acids. In at least one embodiment, the peptide K-mer is a 15 mer with a sliding window of 1-5 amino acids (See Example 4).

[0180] The peptide K-mers derived from an identified protein family (or in some cases, the identified cross-reactive allergenic proteins and one or more identified allergenic proteins) may, for example, be used to probe the experimentally-validated T-cell epitopes and/or B-cell epitopes (typically contained in separate datasets) to identify linear T-cell epitopes and/or linear B-cell epitopes, and the resulting “hits” may be, for example, collected for further analysis and/or use (e.g., for testing for MHC-binding (in silico and/or in vitro), testing for induction of immune response (e.g., induction of cross-reactive IgE, IgG, cytokine release, activation of immune cells, degranulation, etc.) using various cell biology techniques and biochemical assays or immunoassays, development of peptide vaccines, assaying a blood sample or immune cells for presence of cross-reactive antibodies such as IgE, IgG, IgM, etc., MHC-II-binding assays etc. In some embodiments, peptides are used to probe T-cell epitopes. In other embodiments, peptides are used to probe B-cell epitopes.

[0181] Example 4 further describes methods for determining or mapping experimentally-validated T-cell epitopes on all the allergenic proteins present in the exemplary Cupin protein family using the methods of the present disclosure and providing cross-reactive T-cell epitopes that are shared by or common to two or more proteins within the identified Cupin protein family (containing one or more identified allergenic proteins and additional allergenic proteins).

### Identification of Cross-Reactive Peptides Comprising B-Cell Epitopes

[0182] As described above for T-cell epitopes, provided herein are, for example, methods for identifying B-cell epitopes on cross-reactive allergenic proteins. In some embodiments, the B-cell epitopes are present on only a single cross-reactive allergenic protein within a protein family. In some embodiments, the B-cell epitopes are present on two or more cross-reactive allergenic proteins, typically within the same protein family (cross-reactive B-cell epitopes). The peptide K-mers of each allergenic protein within a protein family may be, for example, screened against the set of experimentally-validated B-cell epitopes by applying an alignment algorithm, such as BLAST, BLATP, TBLASTN, FASTA and others known in the art using the B-cell epitope prediction tools described above. Peptides sequences having at least 70% identity over a 70% of the peptide sequence may be, for example, collected and stored in an in silico library. In some embodiments peptide sequences having at least 80% identity over 70% of a peptide sequence are collected and stored in an in silico library. Cross-reactivity scores may be, for example, calculated as described below (such as that used for MHC-II binding T-cell epitopes below and in Example 5) to identify cross-reactive B-cell epitopes and locations of each residue can be identified by aligning the identified B-cell epitopes along the full length of each allergenic protein within the protein family.

[0183] Example 6 provides a non-limiting exemplary embodiment of an in silico method for determining or mapping experimentally-validated B-cell epitopes on all the proteins present in the Cupin protein family and provides exemplary cross-reactive B-cell epitopes that are shared by or common to proteins within the identified Cupin protein family (containing one or more identified allergenic proteins and additional allergenic proteins). Thus, in another aspect, the present disclosure provides in silico methods for identification of cross-reactive B-cell epitopes. Exemplary cross-reactive epitopes present shared by or common to Cupin protein include those listed in Tables 13-23. One of skill in the art will appreciate that the B-cell epitopes on any cross-reactive allergenic protein that is not shared by or common to two or more allergenic proteins in a protein family are non-cross-reactive B-cell epitopes and may be used for identification of specific allergenic proteins or peptides thereof.

[0184] Cross-reactive T-cell epitopes and B-cell epitopes described herein include, for example, those for Cupin family proteins: Ber_e_2, Car_i_2, Fag_e_1, Fag_e_13S, Fag_t_13S_globulin, Jug_n_4, Lup_a_vicilin, Lup_an_1, Pin_k_2, Pis_s_1, Pis_s_2, Pis_v_2, Ses_i_3, Ses_i_6, Ses_i_7, Sin_a_2, Vig_r_2, Cor_a_11, Pis_v_3, and Pis_v_5.

### Identification of MHC-II Binding Epitopes

[0185] The methods of the present disclosure further include, for example, performing one or more bioinformatics steps to assess the ability or the binding potential of identified T-cell epitope peptides and identified B-cell epitope peptides to bind MHC-II molecules.

[0186] In some embodiments, identified T-cell epitopes and B-cell epitopes are further tested for their binding affinity to MHC or HLA class II molecules. This can be performed in a number of different ways. For example, the identified T-cell epitopes above (either predicted or in vitro-validated) can be tested for MHC or HLA binding using one or more bioinformatics steps. As stated above, several MHC-II-binding prediction tools are known in the art. For instance, the Immune Epitope Database (IEDB) at available on the world wide web at IEDB.org hosts a collection of experimentally validated MHC-II binding epitopes. T-cell epitopes (predicted or selected based on stimulation index from in vitro T-cell proliferation studies) and B-cell epitopes may be, for example, probed using IEDB's MHC-II binding tool against the IEDB dataset containing MHC-II binding T-cell epitopes and/or identified B-cell epitopes using one or more bioinformatics steps. Additional bioinformatic tools include NN_MLP (PrintC-MMC_II-NN), NetMHC II (version 2.0), NetMHC II Pan (version 1.0) accessible from internet servers (see, e.g., cbs.dtu.dk/services/NetMHC available on the world wide web).

[0187] In some embodiments, alignment algorithms such as BLASTP or FASTA may be used for screening against the IEDB MHC-II binding epitopes. An experimentally-validated MEW (HLA) epitope having a minimal acceptable homology based on pairwise identity of ≥70% over 80% of the peptide may be, for example, a “hit” or a “match” in the context of the present disclosure.

[0188] Contemplated epitopes may be selected, for example, on the basis of a binding affinity of ≤500 nM Kd to ≤1 nM Kd. In some embodiments, IEDB MHC-II binding epitopes are screened with binding affinity parameter set at ≤500 nM Kd. In some embodiments, IEDB MHC-II binding epitopes can be screening with high binding affinity from Kd≤1 nM Kd, ≤5 nM Kd, ≤10 nM, ≤20 nM Kd, ≤25 nM Kd, ≤50 nM Kd, ≤75 nM Kd, ≤100 nM Kd, ≤150 nM Kd, ≤200 nM Kd, ≤250 nM Kd, ≤300 nM Kd, ≤350 nM Kd, ≤400 nM Kd, ≤450 nM Kd, or ≤500 nM Kd. In some embodiments, IEDB MHC-II binding epitopes are screened with binding affinity parameter set at ≤200 nM Kd to screen for medium to high affinity binders. In some embodiments, IEDB WIC-II binding epitopes are screened with binding affinity parameter set at ≤100 nM Kd to select for medium-high to high affinity binders. In some embodiments, IEDB WIC-II binding epitopes are screened with binding affinity parameter set at ≤50 nM Kd to select for high affinity binders. Accordingly, the resulting “hit” peptides comprising WIC class II binding T-cell epitopes may, for example, have a binding affinity ranging from ≤500 nM Kd to ≤1 nM Kd. In some embodiments, the resulting hit peptides comprising T-cell epitopes have a binding affinity of ≤500 nM Kd. In some embodiments, the resulting hit peptides comprising T-cell epitopes have a binding affinity of ≤100 nM Kd. In some embodiments, the resulting hit peptides comprising T-cell epitopes have a binding affinity of ≤50 nM Kd.

[0189] Input peptide datasets for screening for WIC-II binding epitopes can be, for example (a) T-cell epitopes predicted from use of T-cell epitope prediction tools such as Tepitool (TEPI), or (b) B-cell epitopes predicted from use of B-cell epitope prediction tools, available at IEDB.org performed using overlapping linear K-mer peptides derived from all proteins in a protein family generated as described above in an unsupervised manner to eliminate the potential for bias in selection of WIC-II-binding epitopes peptide. Resulting WIC-II-binding T-cell epitopes and/or WIC-binding B-cell epitopes hits may be, for example, evaluated for coverage and homology. Allergenic peptides comprising WIC-II-binding T-cell epitope peptides and WIC-binding B-cell epitopes may, for example, have homology to the MHC-II-binding T-cell epitopes or MHC-II-binding B-cell epitopes of IEDB.org of at least 70% identity with 80% coverage of the allergenic peptides in the context of the present disclosure. In some embodiments, homology of at least 80% with 70% coverage of the allergenic peptides is selected.

[0190] The resulting WIC-binding T-cell epitopes and MHC-binding B-cell epitopes may be, for example, mapped back to each individual allergenic full-length protein within a protein family to determination the location of each of the WIC-binding T-cell epitopes and the WIC-binding B-cell epitopes, and to identify cross-reactive MHC-binding epitopes shared between the two or more proteins within the protein family. Any identified MHC-binding epitope having a hit on two or more proteins within the protein family may be, for example, identified as cross-reactive epitopes. Alignment algorithms useful for the purpose include BLAST, BLASTP, FASTA, MegAlign etc. Epitope Hit graphs showing the frequency with which the MCH-binding epitopes align along the full-length amino acid sequence of a protein can be generated. Example 5 and FIGS. 9-11 provide further description of this process and the identified MHC-II-binding T-cell epitopes from an exemplary protein family, the Cupin protein family. Each cross-reactive MHC-binding epitope between proteins can be visualized as Circos plots (See exemplary FIGS. 11-14).

[0191] A cross-reactivity score may, for example, be applied to each identified MHC-binding epitope to allow rank ordering of the MHC-binding T-cell epitopes. The cross-reactivity score may, for example, be calculated as:

$$Cross - reactivity score = ( \frac{{\sum }_{i = 1}^{l} h}{l} )$$

where, l is length of peptide (≤15) or number of amino acids in a cross-reactive site (≤15 amino acids). h=number of times the given amino acid in the cross-reactive sites matches with high-confidence Kmers, given that these Kmers must also be matching with at least one other allergen.

[0192] Contemplated cross-reactive sites include regions (length ≤15 amino acids) in any allergenic protein sequence that match (using BLAST) with high-confidence Kmer(s) in such a way that the same given Kmer also matches with another allergen too. Cross-reactive sites may be characterized by the number of redundant high-confidence Kmers that match (using BLAST) a given region of a protein sequence. Again, these Kmers may, for example, be matching with at least two allergens (using BLAST). It is contemplated that if a given amino acid is covered by large number of Kmer sequences then h of that amino acid must be large. Accordingly, in certain embodiments, the cross-reactive score of a given cross-reactive site is the sum of h-scores of its amino acids divided by length of the site, i.e., mean of h-scores.

[0193] In another aspect, the present disclosure provides, for example, that the identified cross-reactive allergenic epitopes can be further ranked ordered and correlated with cross-reactive allergenic proteins identified the method described above and in Examples 1-3 based on cross-reactivity of full-length proteins. Accordingly, in some embodiments, methods for identification of cross-reactive epitopes further include screening the allergenic peptides comprising MHC-II-binding T-cell epitopes of IEDB.org having homology of at least 70% identity and 80% coverage of the peptides against the full-length cross-reactive allergenic proteins (e.g., the additional allergenic proteins having a cross-reactivity score of ≥0.5 and/or homology of at least 70% with respect to at least one identified allergenic protein).

[0194] In another aspect, the present disclosure provides, for example, that the cross-reactive WIC-binding T-cell epitopes identified by the methods disclosed herein bind at least one WIC molecule (haplotype or variants thereof). Information on HLA binding can be obtained for each of the experimentally validated T-cells from IEDB. Exemplary MHC-binding T-cell epitopes of Tables 13-23 bind 1 or more, 10 or more, 25 or more, 50 or more, 75 or more or 100 or more HLA molecules. In some embodiments, the present disclosure provides that the cross-reactive WIC-binding T-cell epitopes bind 1 to 150 WIC molecules and their variants. It is contemplated that immunotherapies, such as vaccines or T-cell epitope therapy, that include epitopes having degenerate HLA-binding may be more likely to succeed. (See, Example 5 and Tables 13-23).

[0195] Identified T-cell epitopes above can also be further tested in vitro for their binding affinity to MCH Class II molecules. For example, soluble HLA class II molecules may, for example, be obtained by lysis of cells homozygous for a given class II WIC molecule. The latter can be purified by affinity chromatography. Soluble Class II molecules may, for example, be incubated with a biotin-labeled reference peptide produced according to its strong binding affinity for that class II molecule. Peptides to be assessed for class II molecule binding may, for example, be incubated at different concentrations and their capacity to displace the reference peptide from its class II binding calculated by addition of neutravidin. See, for example, Texier et al. (2000) J. Immunology 164, 3177-3184.

[0196] In order to determine optimal T cell epitopes by, for example, fine mapping techniques, a cross-reactive epitope peptide having T-cell stimulating activity and thus comprising at least one T-cell epitope as determined by T-cell biology techniques can be modified by addition or deletion of amino acid residues at either amino- or carboxy-terminus of the peptide and tested to determine a change in T-cell reactivity. If two or more peptides share an area of overlap in a native cross-reactive allergenic protein as determined by T-cell biology techniques, additional peptides can be produced combining all or parts of such peptides and these peptides can be tested by a similar method. Following these methods, cross-reactive peptides may, for example, be selected and produced recombinantly or synthetically.

[0197] In one aspect, the present disclosure provides cross-reactive MHC-binding T-cell epitopes, for example those present in Cupin protein family. Exemplary MHC-binding cross-reactive T-cell epitopes are presented in Tables 13-23.

### Identification of Cross-Reactive Peptides Comprising B-Cell Epitopes and T-Cell Epitopes

[0198] In some embodiments, provided herein are allergenic peptides comprising overlapping or adjacent MHC-binding T-cell epitopes and B-cell epitopes. In some embodiments, provided herein are cross-reactive allergenic peptides comprising overlapping or adjacent MHC-binding T-cell epitopes and B-cell epitopes. Such peptides comprising overlapping or adjacent MHC-binding T-cell epitopes and B-cell epitopes can be identified by comparing identified T-cell epitopes (e.g., the MHC-II-binding T-cell epitopes of Tables 13-18, 20, 22) with identified B-cell epitopes on the proteins within a protein family (e.g., B-cell epitopes of Tables 19, 21, and 23).

### Determination of Surface Amino Acids for Determination of Discontinuous Epitopes

[0199] In one aspect, contemplated methods include identification of discontinuous epitopes that may be present on cross-reactive allergenic proteins. Information from identified epitope peptides that include MHC-II-binding T-cell epitopes and/or B-cell epitopes may be supplemented with information regarding discontinuous epitopes. This may be performed by obtaining multiple structural representatives or models of one or more cross-reactive allergenic proteins. Hidden Markov Model profiles may, for example, be generated using the program HMMer3. The HMM may, for example, be used to detect homologous structures in PDB with a minimum of e-value of 1×10⁻³. The HMM is used to align the structures' sequences to a reference sequence (e.g., an identified allergenic protein such as ara h 1 obtained from PDB (DOI: 10.2210/pdb3S7I/pdb)). An expected minimum threshold of 30% identity between at least one member of the cross-reactive allergenic protein or an epitope thereof (MHC-II-binding T-cell epitope or B-cell epitope) may, for example, be set to assert sufficient homology. In certain embodiments, no more than 10% insertions/deletions in the local alignment region are permitted.

[0200] Surface exposure of amino acids from the cross-reactive allergenic protein sequence and the identified allergenic protein may, for example, be predicted using the method described by Holbrook et al. (Protein Eng. 1990 August; 3(8):659-65. doi: 10.1093/protein/3.8.659). A comparison of the predicted surface amino acid residues with linear peptides including MHC-II-binding T-cell epitopes may, for example, aid in the selection of peptides including MHC-II-binding T-cell epitopes.

[0201] Predictions for surface exposure and surface antigenicity may also be performed using NetsurfP 2.0 (BioRxiv. 2018; 311209) and Bepipred2.0 (Jespersen et al. Nucleic Acids Res. 2017; 45:W24-9) software (for example, using default parameters), with the primary sequence of any of the identified allergenic proteins or any of the identified protein family members (such as Cupin, Tropomyosin, Prolamin, Lipid transfer protein, Bet v 1, EF hand, and the like) as an input, which assign either a value of 1 or 0 to each residue. The resulting prediction values may then be averaged over 15-residue epitopes, converted to a percent value, and plotted. The uniqueness and the cross-reactivity of each 15-residue epitope of each of the allergenic proteins among all epitopes in each of the protein families may then be determined by performing a BlastP2.0 search with the parameters defined in the heuristic string method by Berglund et al. (Protein Sci. 2008; 17:606-13.). Many matches may be obtained for each epitope, and the match with greatest homology with the MHC-T-cell binding epitope may be extracted, the corresponding homology converted to a percent value, and plotted as “maximum homology.”

### IV. PREPARATION OF ALLERMAP OF FOOD SOURCES

[0202] An allergenic protein identified to be present in a food source may, for example, be correlated with other additional allergenic proteins within a protein family by providing a map of identified additional proteins to its protein family, then mapping the full-length homology with each additional allergenic protein with the protein family to identify cross-reactive allergenic proteins, and then mapping homology of the cross-reactive allergenic proteins at the MHC-binding epitope (e.g., T-cell) or B-cell epitope.

[0203] Provided herein are methods for mapping allergenic proteins and cross-reactive allergenic proteins for a food sources to create an allergenic food map (an “AllerMap”) for a food source. Allergenic proteins present in a food and cross-reactive allergenic proteins (predicted and/or validated) that are not present in that food may, for example, be determined by the methods disclosed herein. Allergenic proteins having at least 70% homology and/or ≥0.5 A-RISC cross-reactivity score with respect to its identified allergenic protein (reference proteins) may, for example, be included in an AllerMap. In some embodiments, T-cell epitopes and/or B-cell epitopes in each of the identified allergenic proteins and cross-reactive allergenic proteins are included in an AllerMap.

[0204] An AllerMap, in some embodiments, is prepared as an array. FIG. 3 provides an exemplary AllerMap. In FIG. 3, each column of circles represents a protein family and each circle represent a member protein of that protein family. All protein families containing at least one known or potential allergenic protein would be represented in a column. Closed dark circles in each protein family represent known allergenic proteins for a food source for which the AllerMap is created (primary food source). Closed gray circles in each protein family column represent any protein across any protein family or food source that has at least 70% homology and/or ≥0.5 cross-reactivity score with respect to a known allergen in the primary food source. In this manner, the potential for cross-reactivity for each allergenic food source could be captured and depicted for easy, convenient, and visual reference for food allergies for parents of children, subjects, allergists/physicians and healthcare professionals and other having a need to know. An AllerMap is thus contemplated to be helpful in the design and preparation of multiple allergen oral immunotherapy.

### V. SYSTEMS, MEDIA AND METHODS FOR IDENTIFICATION OF CROSS-REACTIVE ALLERGENIC PROTEINS AND EPITOPES THEREOF, DATA TRANSMISSION AND STORAGE

[0205] Contemplated methods disclosed herein include computer-implemented methods. Exemplary embodiments are provided below.

[0206] Provided herein are, for example, computer-implemented methods for identification of cross-reactive allergenic proteins and/or preparing a mixed allergen oral immunotherapy, comprising: (a) mapping one or more identified allergenic proteins present in an multiple allergen oral immunotherapy to full length homology of other allergenic proteins within a protein domain family; (b) identifying cross-reactive allergenic proteins with the identified allergenic proteins by pairwise identity and similarity between the sequences; (c) correlating one or more identified allergenic proteins with other allergenic proteins in the same protein domain family; and/or (d) selecting two or more identified allergenic proteins as a component in an multiple allergen oral immunotherapy if there is at least 70% homology (identity and similarity) with two or more identified cross-reactive allergenic proteins.

[0207] Provided herein are, in some embodiments, computer-implemented methods for identification of an allergenic protein that is cross-reactive with an identified allergenic protein (e.g., to which a subject may have an allergy or intolerance, or that which may be present in Table 2). Such methods may, for example, comprise: (a) receiving, in a computer processing system, a data input comprising a first dataset further comprising a plurality of full-length identified allergenic protein sequences (e.g., those present in Table 2 or those selected to be present in a multiple allergen oral immunotherapy) and a second dataset comprising a plurality of full-length additional allergenic protein sequences in a protein family (e.g., the Cupin protein family, see Table 5); (b) applying an algorithm to compare each of the plurality of full-length additional allergenic protein sequences present in the first dataset to one or more of the plurality of full-length identified allergenic protein sequences present in the second dataset, and determining homology (based on pairwise identity and similarity) of each of the plurality of full-length additional allergenic protein sequences in first dataset to each of the plurality of full-length identified allergenic proteins sequences in the second dataset; (c) applying an algorithm for determining a cross-reactivity score for each of the plurality of the full-length additional allergenic protein sequences in the second dataset with respect to each of the full-length identified allergenic proteins (or reference proteins) sequences in the first dataset to predict cross-reactivity of each of the plurality of full-length additional allergenic protein sequences in the first dataset to the reference proteins; and (d) identifying one or more full-length additional allergenic protein sequences from the second dataset as cross-reactive with one or more of the full-length identified allergenic proteins in the first dataset, wherein the identified full-length cross-reactive allergenic protein is has at least 70% homology to a reference protein and/or a cross-reactivity score of ≥0.5 with respect to a reference protein.

[0208] Provided herein, in some embodiments, are computer-implemented methods for identification of cross-reactive epitopes shared by one or more identified allergenic proteins present in a food source (for example, one or more food sources that may be present in a multiple allergen immunotherapeutic composition) and one or more allergenic proteins within a protein family to which the one or more identified allergenic proteins belong, comprising:
[0209] (a) receiving, in a computer processing system, a data input comprising a first dataset comprising a plurality of full-length allergenic protein sequences present in an identified protein family, wherein the plurality of full-length allergenic protein sequences comprise the one or more identified allergenic protein present in the food source, a second dataset comprising a plurality of overlapping peptide K-mers derived from the plurality of full-length additional allergenic protein sequences from the first dataset; a third dataset comprising a plurality of validated T-cell epitopes; a fourth dataset comprising a plurality of validated MHC-binding T-cell epitopes (e.g., MHC-II-binding epitopes); and/or a fifth dataset comprising a plurality of validated B-cell epitopes;
[0210] (b) applying an algorithm to map the:
[0211] (i) plurality of validated T-cell epitopes in the third dataset on to the overlapping peptide K-mers of the second dataset to identify the presence of one or more validated T-cell epitopes in the second dataset;
[0212] (ii) plurality of validated MHC-binding T-cell epitopes in the fourth dataset on to the overlapping peptide K-mers of the second dataset to identify the presence of one or more validated MHC-binding T-cell epitopes in the second dataset; and/or
[0213] (iii) plurality of validated B-cell epitopes in the fifth dataset on to the overlapping peptide K-mers of the second dataset to identify the presence of B-cell epitopes in the second dataset;
[0214] (c) applying an algorithm to the identified validated T-cell epitopes, MHC-binding T-cell epitopes, and/or the B-cell epitopes in (b) to each of the plurality of full-length allergenic proteins in the first dataset to identify cross-reactive epitopes; and optionally,
[0215] (d) applying an algorithm to compare each of the plurality of full-length allergenic protein sequences present in the first dataset to each of the other full-length allergenic protein sequences present in the first dataset, and determining homology (based on pairwise identity and similarity) of each of the plurality of full-length allergenic protein sequences in first dataset to each of the other full-length allergenic protein sequences in the first dataset; wherein each of the plurality of full-length allergenic proteins is a reference protein with respect to the other full-length allergenic proteins in the first dataset;
[0216] (e) applying an algorithm for determining a cross-reactivity score for each of the plurality of full-length allergenic protein sequences in the first dataset with respect to each of the other full-length allergenic protein sequences (each a reference protein) in the first dataset to identify cross-reactivity of each of the plurality of full-length allergenic protein sequences in the first dataset with respect to a reference protein; and/or
[0217] (f) identifying one or more full-length allergenic protein sequences from the first dataset as cross-reactive with one or more full-length allergenic sequences in the first dataset, wherein the identified full-length cross-reactive allergenic protein has at least 70% homology to a reference protein and/or a cross-reactivity score of ≥0.5 with respect to a reference protein.

[0218] Provided herein are, for example, non-transitory computer-readable media storing thereon executable instructions, that when executed by a computer or a device, causes the computer or a device to execute a method for identification of cross-reactive allergenic protein sequences that are cross-reactive to one or more identified allergenic proteins present in a multiple allergen oral immunotherapy, the method comprising: (a) receiving, in a computer processing system, a data input comprising a first dataset comprising a plurality of identified allergenic proteins sequences (e.g., those present in Table 2 or those selected to be present in a multiple allergen oral immunotherapy) and a second dataset comprising a plurality of additional allergenic protein sequences; (b) applying an algorithm to compare each of the plurality of additional allergenic protein sequences present in the second dataset to one or more of the plurality of identified allergenic protein sequences present in the first dataset, and determining homology (based on pairwise identity and similarity) of each of the plurality of additional allergenic protein sequences in second dataset to each of the plurality of identified allergenic proteins sequences in the first dataset; (c) applying an algorithm for determining a cross-reactivity score for each of the plurality of additional allergenic protein sequences in the second dataset with respect to each identified allergenic protein (or reference protein) sequences in the first dataset (e.g., the identified allergenic proteins present in a multiple allergen oral immunotherapy) to predict cross-reactivity of each of the plurality of additional allergenic protein sequences in the second dataset to a reference protein; and/or (d) identifying one or more additional allergenic protein sequences from the second dataset as cross-reactive with one or more identified allergenic sequences in the first dataset, wherein the identified cross-reactive allergenic protein is at least 70% homologous to a reference protein and has a cross-reactivity score of ≥0.5 with respect to a reference protein, wherein the cross-reactive allergenic protein from the second dataset is not present in the first dataset.

[0219] Provided herein are, for example, non-transitory computer-readable storage media encoded with a computer program including instructions executable by a digital processing device to create an application, the application comprising: (a) a software module configured to obtain a data input comprising a first dataset comprising a plurality of identified allergenic proteins sequences and a second dataset comprising a plurality of additional allergenic protein sequences; (b) a software module configured to apply an algorithm to compare each of the plurality of additional allergenic protein sequences present in the second dataset to one or more of the plurality of identified allergenic protein sequences present in the first dataset, and determining homology (based pairwise identity and similarity) of each of the plurality of additional allergenic protein sequences in second dataset to each of the plurality of identified allergenic proteins sequences in the first dataset; (c) a software module configured to apply an algorithm for determining a cross-reactivity score for each of the plurality of additional allergenic protein sequences in the second dataset with respect to each identified allergenic protein (or reference protein) sequence in the first dataset to predict cross-reactivity of each of the plurality of additional allergenic protein sequences in the second dataset to the reference protein; and (d) a software module for identifying one or more full-length additional allergenic protein sequences from the second dataset as cross-reactive with one or more full-length identified allergenic proteins (or reference proteins) in the first dataset, wherein the identified cross-reactive allergenic protein is at least 70% homologous to a reference protein and/or has a cross-reactivity score of ≥0.5 with respect to a reference protein, wherein the cross-reactive allergenic protein from the second dataset is not present in the first dataset.

[0220] Provided herein are, for example, computer-implemented systems, that are configured to implement the methods of the disclosure. The system can include a digital processing device that is programmed to implement the methods described herein. In some embodiments, provided herein is a computer-implemented system comprising: (a) a digital processing device comprising an operating system configured to perform executable instructions, and a memory device; and (b) a computer program including instructions executable by a digital processing device to create an application comprising: (i) a software module configured to receive a software module configured to obtain a data input comprising a first dataset comprising a plurality of full-length identified allergenic protein sequences and a second dataset comprising a plurality of full-length additional allergenic protein sequences; (ii) a software module configured to apply an algorithm to compare each of the plurality of full-length additional allergenic protein sequences present in the second dataset to one or more of the plurality of full-length identified allergenic protein sequences present in the first dataset, and determining homology (based on pairwise identity and similarity) of each of the plurality of full-length additional allergenic protein sequences in second dataset to each of the plurality of full-length identified allergenic proteins sequences in the first dataset; (iii) a software module configured to apply an algorithm for determining a cross-reactivity score for each of the plurality of full-length additional allergenic protein sequences in the first dataset with respect to each of the full-length identified allergenic protein (or reference protein) sequences in the second dataset to predict cross-reactivity of each of the plurality of full-length additional allergenic protein sequences in the first dataset to the full-length reference proteins; and/or (iv) a software module for correlating one or more additional allergenic protein sequences from the second dataset as cross-reactive with one or more full-length identified allergenic protein sequences in the second dataset, wherein the full-length identified cross-reactive allergenic protein is at least 70% homologous to a full-length reference protein and/or has a cross-reactivity score of ≥0.5 with respect to a full-length reference protein, wherein the full-length cross-reactive allergenic protein from the first dataset is not present in the second dataset.

[0221] In some embodiments, algorithms applied include alignment algorithms such as FASTA, BLAST, BLASTP, TBLASTN and others disclosed herein and known in the art.

[0222] In some embodiments, an algorithm applied includes a A-RISC score calculation.

[0223] In some embodiments, a computer-mediated method, non-transitory computer-readable media, non-transitory computer-readable storage media, and/or computer-mediated system of the present disclosure includes one or more bioinformatics steps to generate an in silico library comprising a plurality of peptides derived a plurality of full-length additional allergenic protein sequences (for example, from a second dataset). Algorithms for generating overlapping peptides are known in the art (e.g., PepSequencer from JPT Innovative Tools). In some embodiments, contemplated methods further comprise obtaining a dataset comprising overlapping peptides derived from one or more allergenic protein sequences (for example, from a plurality of full-length additional allergenic protein sequences in a dataset, for example, a second dataset). Such may, for example, be overlapping peptides (Kmers), for example, from 5 amino acids to 100 amino acids in length. In some embodiments, contemplated peptides are 5-30 mers and have a sliding window of 1-5 amino acids. In some embodiments, contemplated peptides are overlapping 15-mer peptides with a sliding window of 1-5 amino acids.

[0224] In some embodiments, a computer-mediated method, non-transitory computer-readable media, non-transitory computer-readable storage media, and/or computer-mediated system of the present disclosure further includes obtaining a dataset containing a plurality of T-cell epitopes present in one or more allergens (for example, one or more food allergens). T-cell epitopes are available from databases such as IEDB, MHCBN (available on the world wide web at crdd.osdd.net/raghava/mhcbn/). An alignment algorithm may, for example, be applied to each of a plurality of peptides to determine homology (based on pair-wise identity and similarity) and generate an in silico T-cell epitope library containing a plurality of peptides containing T-cell epitopes identified to be present on cross-reactive allergenic proteins. Homology may, for example, be determined by application of an algorithm such as BLAST, BLASTP, FASTA as described above or any other algorithm known in the art for aligning and/or identification of short peptide sequences.

[0225] In some embodiments, a computer-mediated method, non-transitory computer-readable media, non-transitory computer-readable storage media, and/or computer-mediated system of the present disclosure further includes determining the potential for binding to MHC-II molecules by a peptides containing a T-cell epitopes (for example, T-cell epitopes identified using method disclosed herein). Accordingly, contemplated methods further include obtaining a dataset comprising a plurality of experimentally validated MHC-II-binding T-cell epitopes. An alignment algorithm may, for example, be applied to each of the plurality of peptides containing T-cell epitopes to identify a plurality of peptides containing MHC-II-biding T-cell epitopes. Binding affinity parameter ranges can be, for example, 1 Kd to ≤500 Kd. In some embodiments, a binding parameter is set at ≤500 Kd. In some embodiments, a binding affinity parameter is set at ≤100 Kd.

[0226] In some embodiments, a computer-mediated method, non-transitory computer-readable media, non-transitory computer-readable storage media, and/or computer-mediated system of the present disclosure includes applying an alignment algorithm to an overlapping peptide and an MHC-II-biding T-cell epitope to identify the potential for MHC-II binding by the overlapping peptides.

[0227] In some embodiments, overlapping peptides have homology with MHC-II-binding T-cell epitopes (for example, have at least 70% identity and 80% coverage over the length of the peptide). Homology can be determined by application of algorithms such as BlastP and/or FASTA as described above. In some embodiments, peptides having homology (based on 70% identity (exact match) and 80% coverage)) with MHC-II-binding epitopes having a binding affinity of 1 Kd to ≤500 Kd and are selected and stored locally in an in silico MHC-II-binding epitope library. In some embodiments, peptides having homology (based on 70% identity (exact match) and 80% coverage)) with MHC-II-binding epitopes have a binding affinity of 1 Kd to ≤100 Kd and are selected and stored locally in an in silico MHC-II-binding epitope library.

[0228] In some embodiments, a computer-mediated method, non-transitory computer-readable media, non-transitory computer-readable storage media, and/or computer-mediated system of the present disclosure includes correlating one or more specific allergenic proteins with other allergenic proteins within a protein family to identify cross-reactive peptides containing specific T-cell epitopes and/or specific B-cell epitopes. Such correlation includes mapping each of the plurality of identified allergenic proteins to its protein family, mapping the full-length homology and cross-reactivity scores of all allergenic proteins present within each protein family to identify cross-reactive allergenic proteins within each protein family, and then mapping T-cell epitopes or B-cell epitopes or both on each cross-reactive allergenic protein with a protein family. Correlation is performed by applying one or more algorithms, such as Blastp, FASTA and/or others known in the art to determine pair-wise identity and similarity between a pair of allergenic sequences (specific allergenic protein and other allergenic proteins) with a protein family thereby identifying cross-reactive proteins. Each specific allergenic protein within a protein family is thus mapped to other allergenic proteins with each protein family for identification of cross-reactive peptides containing specific T-cell epitopes and/or specific B-cell epitopes.

[0229] In some embodiments of a computer-mediated method, non-transitory computer-readable media, non-transitory computer-readable storage media, and/or computer-mediated system of the present disclosure, peptides containing MHC-II-binding T-cell epitopes in an in silico MHC-II-binding T-cell epitope library are screened in in vitro T-cell binding assays and or IgE binding assays using the methods known in the art to select desirable peptides containing the T-cell epitopes.

### Digital Processing Device

[0230] In some embodiments, systems, media and methods described herein include a digital processing device or a use of the same. In further embodiments, a digital processing device includes one or more of a hardware central processing unit (CPU) or a processor that carry out a devices' function. Non-limiting examples of processors include microprocessors, digital signal processors, graphics processing units, and the like. In further embodiments, a digital processing device comprises an operating system configured to perform executable instructions. A digital processing device may also include processors such as microprocessors, digital signal processors, graphics processing units, and data acquisition units. A digital processing device may also be optionally connected to a: computer network, the intranet, and/or the internet such that it accesses world wide web. In further embodiments, a processor is optionally connected to a cloud computing infrastructure, a memory device and/or a data storage device.

[0231] In accordance with the description herein, suitable processors include, by way of non-limiting examples, server computers, desktop computers, laptop computers, notebook computers, sub-notebook computers, netbook computers, netpad computers, set-top computers, handheld computers, mobile smartphones, tablet computers, and the like. Those of skill in the art will recognize that many smartphones, television, video players, and digital music players with optional computer network connectivity are suitable for use in the system described herein.

[0232] In other embodiments, a digital processor device includes an operating system configured to perform executable instructions. An operating system is for example, software, including programs and data, which manages a device's hardware and provides services for execution of applications. Those of skill in the art will recognize that suitable server operating systems include by way of non-limiting examples, FreeBSD, OpenBSD, NetBSD®, Linux, Apple®, Mac OS X Server®, Oracle®, Solaris®, Windows Server®, VMware, and Novell Netware®. Those of skill in the art will recognize that suitable personal computer operating systems include, by way of non-limiting examples, Microsoft®, Windows®, Apple®, Mac OS X®, UNIX®, and Unix-like operating systems, such as GNU/Linux®. In some embodiments, a device includes a storage and/or memory device.

[0233] In some embodiments, a digital processing device includes a display to send visual information to a user. In some embodiments, a display is a cathode ray tube (CRT), a liquid crystal display (LCD), a thin film transistor liquid crystal display (TFT-LCD), organic light-emitting diode (OLED), a passive-matrix OLED (PMOLED), active-matrix OLED (AMOLED) display, a plasma display, a video projector or a combination thereof.

[0234] In some embodiments, a digital processor device includes an input device to receive information from a user. In some embodiments, a user is a subject having two or more food allergies or two or more food-intolerances such as peanuts, cashews and like, medical professional, researcher, analyst, or a combination thereof. In some embodiments, a medical professional is an allergist, clinician, doctor, nurse, physician's assistant, pharmacist, medical consultant, or other hospital or medical professional. In some embodiments, an input device is a keyboard. In some embodiments, an input device is a pointing device, by way of non-limiting examples, a mouse, trackball, trackpad, or stylus. In other embodiments, an input device is a touch screen or multi-touch screen.

### Non-transitory Computer-Readable Storage Media

[0235] In some embodiments, contemplated systems, media, and methods disclosed herein include one or more non-transitory computer-readable storage medium encoded with a program including instructions executable by an operating system of an optionally networked digital processing device. In further embodiments, a computer-readable storage medium is a tangible component of a digital processing device. In further embodiments, a computer-readable medium is optionally removable from a digital processing device. In some embodiments, a computer-readable storage medium includes CD-ROMS, DVDs, DVD-ROM, flash memory drives, magnetic tape drives, magnetic disk drives, optical disc drives, solid-state drives, and cloud computing-based systems such as azure, AWS, and the like. In further embodiments, programs and instructions are permanently, substantially permanently, semi-permanently, or non-transitorily encoded on the media.

### Computer Programs

[0236] In some embodiments, systems, media, and methods disclosed herein include at least one computer program, or use of the same. A computer program includes a sequence of instructions, executable in a digital processing device's computer, (such as a CPU or a microprocessor) written to perform a specified task. Computer-readable instructions may be implemented as a computer, program module, such as function, object, application, Application Programming Interfaces (APIs), data structure, and the like, that performs a particular task or implements particular abstract data types. Those of skill in the art will recognize that a computer program may be written in various versions of various languages. In various embodiments, a computer program includes one or more software modules. In various embodiments, a computer program includes, in part or in whole, one or more web applications, one or mobile applications, one or more standalone applications, one or more web browser plugins, extensions, add-ins, or combinations thereof.

### Web Applications

[0237] In some embodiments, a computer program includes a web application. One of skill in the art will understand that a web application, in various embodiments, utilizes one or more software frameworks and one or more database systems. In some embodiments, a web application is created upon a software framework such as JAVA, Microsoft.NET or Ruby on Rails (RoR). In some embodiments, a web application may utilize one or more database systems such as Microsoft® SQL Server, mySQL®, noSQL, and Oracle®. Those of skill in the art will also recognize that a web application, in various embodiments, is written in one or more versions of one or more languages. A web application may be written in one or more markup languages, presentation definition languages, client-side scripting languages, server-side coding languages, database query languages, or combinations thereof. In some embodiments, a web application is written to some extent in a markup language such as Hypertext Markup Language (HTML), Extensible Hypertext Markup Language (XHTML), or extensible Markup Language (XML).

### Mobile Application

[0238] In some embodiments, a computer program includes a mobile application provided to a mobile digital processing device. In some embodiments, an application is provided to a mobile digital processing device via a computer network. In other embodiments, a mobile application is provided to a mobile digital processing device at the time it is manufactured.

[0239] A mobile application may be, for example, created by methods known to those of skill in the art using hardware, languages, and development environments known to the art. Those of skill in the art will recognize that mobile applications are written in several languages, such as C, C++, C #, Objective-C, Java™, Javascript, Pascal, Object Pascal, Python™, Ruby, R, VB.NET, WML, and XHTML/HTML with or without CSS, or combinations thereof. Suitable mobile application development environments are available, such as AirplaySDK, alcheMo, Appcelerator®, Celsius, Bedrock, Flash Lite, .NET Compact Framework, Rhomobile, and WorkLight Mobile Platform, Lazarus, MobiFlex, MoSync, and Phonegap, mobile software developer kits such as iPhone and iPad (iOS) SDK, Android™ SDK, BlackBerry® SDK, BREW SDK, Palm® OS SDK, Symbian SDK, webOS SDK, and Windows® Mobile SDK.

### Software Modules

[0240] In some embodiments, the systems, media, and methods disclosed herein include software, server, and/or database modules, or use of the same. Software modules may be created by techniques known to those of skill in the art using machines, software, and languages known to the art. The software modules disclosed herein may be implemented in a multitude of ways. In various embodiments, a software module comprises a file, a section of code, a programming object, a programming structure, or combinations thereof. In further embodiments, a software module comprises a plurality of files, a plurality of sections of code, a plurality of programming objects, a plurality of programming structures, or combinations thereof. In various embodiments, one or more software modules comprise, by way of non-limiting examples, a web application, a mobile application, and a standalone application.

### Databases

[0241] In some embodiments, the systems, media, and methods disclosed herein include one or more databases, data sources, or use of the same. Those of skill in the art will recognize that many databases are suitable for storage and retrieval of data. In various embodiments, suitable databases include, by way of non-limiting examples, relational databases, non-relational databases, object-oriented databases, object databases, entity-relationship model databases, associative databases, and XML databases. In some embodiments, a database is internet-based, web-based, cloud computing-based or on one or more local computer storage devices.

[0242] In some embodiments, databases or data sources are selected from genomic databases, allergen databases, clinical trial databases, scientific databases, or a combination thereof. In some embodiments, the one or more databases or sources comprise publicly available databases, proprietary databases, or a combination thereof.

### Data Transmission

[0243] Any appropriate method can be used to communicate information pertaining to data generated by the compositions and methods of the present disclosure to another person. In some embodiments, the systems, media and methods disclosed herein further comprise one or more transmission devices comprising an output means for transmitting one or more data, results, outputs, information, reports and images. In some embodiments, the output means takes any form which transmits the data, results, requests, and/or information and comprises a monitor, printed format, printer, computer, processor, memory location, or a combination thereof. In some embodiments, the transmission device comprises one or more processors, computers, and/or computer systems for transmitting information.

[0244] In some embodiments, transmission comprises tangible transmission media and/or carrier-wave transmission media. In some embodiments, tangible transmission media include coaxial cables; copper wire and fiber optics, including the wires that comprise a bus within a computer system. In some embodiments, carrier-wave transmission media takes the form of electric or electromagnetic signals, or acoustic or light waves such as those generated during radio frequency (RF) and infrared (IR) data communications.

[0245] The output can be presented to a user with the aid of a user interface, such a graphical user interface.

### VI. CROSS-REACTIVE ALLERGENIC PROTEINS AND CROSS-REACTIVE EPITOPES

[0246] In one aspect, provided herein are cross-reactive allergenic proteins and cross-reactive epitopes (for example, T-cell epitopes, MHC-binding binding epitopes, and B-cell epitopes) identified (or identifiable) by methods of the present disclosure.

[0247] In another aspect, provided herein are T-cell epitopes present on cross-reactive allergenic proteins Ber_e_2, Car_i_2, Fag_e_1, Fag_e_13S, Fag_t_13S_globulin, Jug_n_4, Lup_a_vicilin, Lup_an_1, Pin_k_2, Pis_s_1, Pis_s_2, Pis_v_2, Ses_i_3, Ses_i_6, Ses_i_7, Sin_a_2, Vig_r_2, Car_i_4, Gly_m_5, Gly_m_6, Jug_r_4, Len_c_1 and Pru_du_6 belonging to the Cupin protein family (see Tables 13-18). In some embodiments, the T-cell epitopes are cross-reactive T-cell epitopes.

[0248] In another aspect, provided herein are B-cell epitopes present on cross-reactive allergenic proteins Ber_e_2, Car_i_2, Fag_e_1, Fag_e_13S, Fag_t_13S_globulin, Jug_n_4, Lup_a_vicilin, Lup_an_1, Pin_k_2, Pis_s_1, Pis_s_2, Pis_v_2, Ses_i_3, Ses_i_6, Ses_i_7, Sin_a_2, Vig_r_2, Car_i_4, Gly_m_5, Gly_m_6, Jug_r_4, Len_c_1 and Pru_du_6 belonging to the Cupin protein family (see Table 19). In some embodiments, the B-cell epitopes are cross-reactive B-cell epitopes.

[0249] One of skill in the art will appreciate that polynucleotides and oligonucleotides (including DNA, cDNA, mRNA and the like) that can be translated to provide the cross-reactive allergenic proteins and the cross-reactive epitopes of the present disclosure are within the scope of the disclosure. Sequences for polynucleotides and oligonucleotides corresponding to the cross-reactive B-cell and T-cell epitopes including WIC-binding T-cell epitopes are readily ascertainable from Genbank/Swiss Protein using Genbank/Swiss_prot ID and allergen ID and/or by reverse translation. It is understood that all polynucleotides and oligonucleotides encoding the cross-reactive allergenic proteins and cross-reactive epitopes are within the scope of the present disclosure. It is also understood that cross-reactive epitopes of the present disclosure include all epitopes, including T-cell epitopes and B-cell epitopes, that are present on allergenic proteins and variants thereof, for example, determined or determinable to be cross-reactive using the methods of the present disclosure.

[0250] Cross-reactive allergenic proteins and cross-reactive epitope peptides may, for example, be useful in the treatment, prevention and management of not only IgE-mediated diseases, disorders and conditions, including but not limited to, allergies, food-intolerance, inflammatory diseases, autoimmune diseases, general immune health and the like, but also any disease that is sensitive to or involves the cross-reactive allergenic proteins and/or cross-reactive epitopes of the present disclosure. Cross-reactive allergenic proteins and the cross-reactive epitopes of the present disclosure may, for example, also be useful in preparation of compositions and kits comprising cross-reactive allergenic proteins and/or cross-reactive epitope peptides. Cross-reactive allergenic proteins and cross-reactive epitope peptides of the present disclosure may, for example, also be useful in the preparation of vaccines, T-cell peptide therapeutics, and other immunotherapeutics, binding partners such as antibodies (and/or fragments thereof), tests, assays, diagnostics, reagents, kits, and single allergen and multiple allergen immunotherapeutic compositions, etc.

[0251] In some embodiments, provided herein are cross-reactive allergenic proteins and compositions comprising them. Non-limiting exemplary cross-reactive allergenic proteins include identified allergenic proteins of Table 2, the cross-reactive allergenic proteins present in identified protein families of Table 3, and cross-reactive allergenic proteins present in Tables 4-7 and 10-12. In some embodiments, one or more cross-reactive allergenic proteins are selected from Cupin protein family (Tables 5 and 10). In some embodiments, compositions comprise three or more cross-reactive allergenic proteins from Cupin protein family (Tables 5 and 10). In some embodiments, cross-reactive allergenic proteins are selected from Table 2. In some embodiments, compositions comprise one or more cross-reactive allergenic proteins selected from Tables 4-7 and 10-12. In some embodiments, compositions comprise one or more cross-reactive allergenic protein selected from the group consisting of Ber_e_2, Car_i_2, Fag_e_1, Fag_e_13S, Fag_t_13S_globulin, Jug_n_4, Lup_a_vicilin, Lup_an_1, Pin_k_2, Pis_s_1, Pis_s_2, Pis_v_2, Ses_i_3, Ses_i_6, Ses_i_7, Sin_a_2, Vig_r_2, Car_i_4, Gly_m_5, Gly_m_6, Jug_r_4, Len_c_1 and Pru_du_6, or any combination thereof. In some embodiments, compositions comprise at least two cross-reactive allergenic proteins selected from the group consisting of Ber_e_2, Car_i_2, Fag_e_1, Fag_e_13S, Fag_t_13S_globulin, Jug_n_4, Lup_a_vicilin, Lup_an_1, Pin_k_2, Pis_s_1, Pis_s_2, Pis_v_2, Ses_i_3, Ses_i_6, Ses_i_7, Sin_a_2, Vig_r_2, Car_i_4, Gly_m_5, Gly_m_6, Jug_r_4, Len_c_1 and Pru_du_6.

[0252] In some embodiments, compositions comprise one or more whole (complete) food sources (for example a whole food flour or powder, or protein extracts from a whole food source), for example, food sources provided in Table 8.

[0253] In some embodiments, cross-reactive allergenic proteins and cross-reactive epitope peptides of the present disclosure are used to prepare compositions, kits, vaccines and T-cell peptide therapies as described in detail below and also to make tests and assays, such as diagnostic assays, cross-reactive IgE assays, etc. Such cross-reactive allergenic proteins may be present in a composition as isolated or extracted proteins or as recombinant, or synthesized full-length proteins. In some embodiments, compositions are single allergen immunotherapeutic compositions. In some embodiments, compositions are multiple allergen immunotherapeutic compositions. In some embodiments, single allergen immunotherapeutic compositions comprise a cross-reactive allergenic protein (e.g., an identified allergenic protein, or an allergenic protein from any of the identified protein families such as Cupin protein family). In some embodiments, a multiple allergen immunotherapeutic composition comprises two or more allergenic proteins. Each of the two or more allergenic proteins may, for example, be from a single protein family or from 2 different protein families. Two or more allergenic proteins can be identified allergenic proteins from a single food source or they can be from different food sources. Allergenic proteins may, for example, be identified allergenic proteins (e.g., from Table 2), cross-reactive allergenic proteins from the same protein family, or cross-reactive proteins from a different protein family. In some multiple allergen immunotherapeutic compositions, no allergenic protein listed in Table 2 is included. Allergenic proteins may be full-length proteins or peptides or fragments thereof. A single allergen immunotherapeutic composition may comprise one or more cross-reactive epitope peptides from a single allergenic protein.

[0254] In some embodiments, provided herein are cross-reactive epitope peptides and compositions comprising the same. In some embodiments, cross-reactive epitope peptides are MHC-binding T-cell epitopes. In some embodiments, cross-reactive epitopes peptides are MHC-II-binding T-cell epitope peptides located in cross-reactive allergenic proteins in the Cupin protein family. Examples of MHC-II-binding T-cell epitope peptides include but are not limited to the MHC-II-binding T-cell epitope peptides provided in Tables 13-18. In some embodiments, cross-reactive epitopes peptides are B-cell epitope peptides located in cross-reactive allergenic proteins in the Cupin protein family. Examples of B-cell epitope peptides include but are not limited to the MHC-II-binding T-cell epitope peptides provided in Table 19. In some embodiments, one or more cross-reactive epitope peptides are derived from Ber_e_2, Car_i_2, Fag_e_1, Fag_e_13S, Fag_t_13S_globulin, Jug_n_4, Lup_a_vicilin, Lup_an_1, Pin_k_2, Pis_s_1, Pis_s_2, Pis_v_2, Ses_i_3, Ses_i_6, Ses_i_7, Sin_a_2, Vig_r_2, Car_i_4, Gly_m_5, Gly_m_6, Jug_r_4, Len_c_1 and Pru_du_6, or any combination thereof. In some embodiments, a composition comprises at least 4 cross-reactive epitope peptides, for example, derived from Ber_e_2, Car_i_2, Fag_e_1, Fag_e_13S, Fag_t_13S_globulin, Jug_n_4, Lup_a_vicilin, Lup_an_1, Pin_k_2, Pis_s_1, Pis_s_2, Pis_v_2, Ses_i_3, Ses_i_6, Ses_i_7, Sin_a_2, Vig_r_2, Car_i_4, Gly_m_5, Gly_m_6, Jug_r_4, Len_c_1 and/or Pru_du_6.

[0255] In some embodiments, provided herein are compositions comprising one or more cross-reactive epitope peptides. Contemplated ross-reactive epitope peptides may be synthetic, recombinant or natural. In some embodiments, the present disclosure provides one or more recombinant or synthetic cross-reactive epitopes.

[0256] In some embodiments, a cross-reactive epitope peptide is from about 5 to about 200 amino acids in length, about 6 to about 150 amino acids in length, about 7 to about 100 amino acids in length, about 8 to about 50 amino acids in length, or about 8 to about 35 amino acids in length. In some embodiments, a cross-reactive epitope peptide is from about 5 to 25 amino acids in length. In some embodiments, a cross-reactive epitope peptide is from about 8 to about 20 amino acids in length. In some embodiments, a cross-reactive epitope peptide is 20 amino acids in length. In some embodiments, a cross-reactive epitope peptide is 14 amino acids in length. In some embodiments, a cross-reactive epitope peptide is 15 amino acids in length. In some embodiments, a cross-reactive epitope peptide is a T-cell epitope, e.g., a MHC-II-binding T-cell epitope.

[0257] The disclosure also provides polynucleotides or oligonucleotides encoding cross-reactive allergenic proteins and cross-reactive epitope peptides, for example, those disclosed herein.

[0258] In some embodiments, provided herein are isolated cross-reactive epitope peptides comprising one or more cross-reactive epitopes that bind to one or more members of an MHC or HLA binding region. In some embodiments, an MHC is MHC class II or HLA class II. In some embodiments, cross-reactive epitope peptides which bind to MHC binding regions may be intracellularly located. In some embodiments, cross-reactive epitope peptide that bind to MHC are partially extracellularly located or partially intracellularly located. In some embodiments, a cross-reactive epitope peptide that binds to MHC may be located extracellularly. In some embodiments, MHC binding peptides are T-cell peptides. In some embodiments, T-cell epitopes are linear epitopes. In some embodiments, MHC-II-binding T-cell epitopes are linear epitopes.

[0259] In some embodiments, a cross-reactive epitope peptide that binds to an WIC is from about 5 to about 200 amino acids in length. In some embodiments, a cross-reactive epitope peptide is from about 6 to about 150 amino acids in length. In some embodiments, a cross-reactive epitope peptide that binds to an MHC is from about 5 to about 25 amino acids in length. In some embodiments, a cross-reactive epitope peptide that binds to an MHC is from about 8 to about 20 amino acids in length. In some embodiments, a peptide that binds an MHC is 8, 9, 10, 11, 12, 13, 14, 14, 15, 16, 17, 18, 19 or 20 amino acids in length. In some embodiments, a peptides is 15 amino acids in length. In some embodiments, a cross-reactive epitope peptide is 14 amino acids in length.

[0260] In some embodiments, several cross-reactive epitope peptides comprising MHC-binding T-cell epitopes (such as 2, 3, 4, 6, or 50 peptides) are attached as contiguous peptide molecule. In some embodiments, several peptides may be linked as polypeptides. In some embodiments, an MHC is a human WIC (HLA). In some embodiments, an WIC is a mouse WIC. In some embodiments, a cross-reactive epitope peptide has at least 70% identity with at least 80% coverage over the length of the peptide. In some embodiments, a cross-reactive epitope peptides has at least 80% identity with at least 70% coverage over the length of the peptide. In some embodiments, a cross-reactive epitope peptide that binds to an WIC is shared by or common to 2 or more, 3 or more, 4 or more, 5 or more, 6 or more, 7 or more, 8 or more, 9 or more, or 10 or more allergenic proteins within a protein family. Non-limiting exemplary cross-reactive MHC-binding T-cell peptides are provided in Tables 13-18, 20, and 22. Non-limiting exemplary cross-reactive B-cell peptides are provided in Tables 19, 21, and 23.

[0261] In some embodiments, a cross-reactive WIC-binding T-cell epitope on an allergenic protein is cross-reactive with 1 or more identified allergenic proteins within the protein family. In some embodiments, a cross-reactive MHC-binding T-cell epitope on an allergenic protein is cross-reactive with 2 or more, 3 or more, 4 or more, 5 or more, 6 or more, 7 or more, 8 or more, 9 or more, or 10 or more other allergenic proteins within a protein family. In some embodiments, a cross-reactive MHC-binding epitope on a cross-reactive protein is cross-reactive with 2 or more, 3 or more, 4 or more, 5 or more, 6 or more, 7 or more, 8 or more, 9 or more, or 10 or more cross-reactive allergenic proteins within a protein family. In some embodiments, a cross-reactive WIC-binding T-cell epitope on a cross-reactive allergenic protein is cross-reactive with all allergenic proteins within a protein family.

[0262] In some embodiments, a cross-reactive T-cell epitope peptide binds to one or more MHC binding regions with a binding affinity for at least one WIC binding region of ≤500 nM Kd, ≤400 nM Kd, ≤300 Kd, ≤200 nM Kd, ≤150 nM Kd, ≤100 nM Kd, ≤75 nM Kd, ≤50 nM Kd, ≤25 nM Kd, ≤20 nM Kd, ≤15 nM Kd, ≤10 nM Kd, ≤5 nM Kd, or ≤1 nM Kd. In some embodiments, a cross-reactive epitope peptide that binds to one or more WIC binding regions has a binding affinity for at least one WIC-II of ≤100 nM Kd. Exemplary cross-reactive peptides that bind one or more WIC-binding regions are provided in Tables 13-18 (Cupin MHC-binding T-cell epitopes). In some embodiments, a cross-reactive epitope peptide that binds to one or more WIC binding regions has a binding affinity for at least one WIC-II of ≤50 nM Kd. In some embodiments, a cross-reactive epitope peptide that binds to one or more WIC binding regions is a weak affinity binder, a medium affinity binder or a high affinity binder. In some embodiments, a binding affinity is determined by application of MHC binding predictive tools and algorithms such as TEPI on the server available on the world wide web at IEDB.org.

[0263] Further, information on the type of WIC molecules (e.g., WIC-II DR, DQ, etc. and variants thereof) that contemplated experimentally-validated T-cells and/or B-cells bind can be obtained and analyzed as described in Example 5. The present disclosure provides compositions, kits, vaccines, antibodies and diagnostic assays that are matched to subjects having a particular HLA allele or haplotype. In some embodiments, peptides of the present disclosure comprise one or more epitopes that bind with a strong affinity to from 1 to 150, 1 to 100, 1 to 80, 1 to 75, 10 50, 1 to 30, 1 to 25, 1 to 20, 1 to 15, 1 to 10, 1 to 5, 1 to 2, 2 or 1 HLA alleles and/or their variants. In some embodiments, peptides of the present disclosure comprise one or more epitopes that bind with a medium affinity to from 1 to 150, 1 to 100, 1 to 80, 1 to 75, 10 50, 1 to 30, 1 to 25, 1 to 20, 1 to 15, 1 to 10, 1 to 5, 1 to 2, 2 or 1 HLA allele or haplotypes. In some embodiments, peptides of the present disclosure comprise one or more epitopes that bind with a weak affinity to from 1 to 150, 1 to 100, 1 to 80, 1 to 75, 10 50, 1 to 30, 1 to 25, 1 to 20, 1 to 15, 1 to 10, 1 to 5, 1 to 2, 2 or 1 HLA haplotypes and/or their variants.

[0264] Disclosed herein, for example, are cross-reactive WIC-II binding T-cell epitopes present in cross-reactive allergenic proteins that are able to bind large number of MHC molecules (from 1 to over 150 MHC variants) (See Tables 13-18, 20, and 22).

[0265] To obtain degenerate cross-reactive MHC-II-binding T-cell epitope peptides, methods of the present disclosure can be used to analyze the allergenic proteins within Tables 4-7. Tables 13-18, 20, and 22 provide a summary of disclosed cross-reactive MHC-II-binding T-cell epitopes. Binding affinity for epitopes in Tables 13-18, 20, and 22 is at least ≤100 Kd. It is expected that MHC degeneracy observed with disclosed cross-reactive MHC-II-binding T-cell epitope peptides as well as the medium-high and high affinity binding of MHC molecules by disclosed cross-reactive epitopes may, for example, be advantageous for use in diagnostics and therapeutics such as vaccines and T-cell peptide therapy, multiple allergen immunotherapy, etc. Further, one of skill in the art will appreciate that the compositions comprising the cross-reactive allergenic proteins and cross-reactive epitopes of the present disclosure may, for example, be matched to a subject having a particular MHC haplotype and/or variant, wherein the match is determined by the binding affinity of a particular cross-reactive T-cell epitope or epitopes to the HLA allele of the subject.

[0266] In some embodiments, a cross-reactive MHC-binding T-cell epitope peptide also includes a B-cell epitope. In some embodiments, a B-cell epitope is also cross-reactive with one or more allergenic proteins. Peptide sequences containing both a B-cell epitope and a MHC-binding T-cell epitope may overlap or be adjacent to each other. Cross-reactive epitope peptides sequences containing both the MHC-binding T-cell epitope and a B-cell epitope within a defined area of overlap are readily ascertainable by mapping (e.g., by alignment algorithm such as FASTA, BLAST, MegAlign) identified epitopes within a source protein, for example, a cross-reactive allergenic Cupin protein as described in Example 5. In some embodiments, a B-cell epitope and a MHC-binding T-cell epitope overlap or are adjacent. The overlap of sequences may be within about 1 to about 20 amino acids, about 2 to about 20 amino acids, about 3 to about 20 amino acids, about 1 to about 10 amino acids, about 2 to about 5 amino acids, about 3 to about 7 amino acids, or about 2 to about 8 amino acids.

[0267] In some embodiments, cross-reactive peptides are B-cell epitope peptides. In other embodiments, cross-reactive peptides are MHC-binding peptides.

[0268] The present disclosure provides, for example, a nucleic acid encoding one or more of the cross-reactive epitope peptides or cross-reactive allergenic proteins described herein (for example an identified allergenic protein of Table 2 and/or a cross-reactive allergenic protein in any of the identified protein families of Table 3 (for example, Cupin protein family)).

[0269] Cross-reactive epitopes and peptides comprising such cross-reactive epitopes may be further derivatized, for example, to include a hapten. Haptens or small low molecular weight molecules may be attached to cross-reactive epitope peptides or polypeptides comprising such cross-reactive epitopes. Haptens include but are not limited to fluorophores, biotin, and phosphate group linked to an amino acid (e.g., phosphothreonine, phosphotyrosine, etc.).

[0270] In some embodiments, a polypeptide includes a flanking sequence extending beyond the region comprising a cross-reactive T-cell epitope peptide and/or a cross-reactive B-cell epitope peptide. Such a flanking sequence may be used in assuring a synthetic version of the peptide is displayed in such a way as to represent a topological arrangement in its native state. Flanking sequences may be included to allow multiple peptides to be arranged together as epitopes that occur adjacent to each other in a native protein. A flanking sequence may be used to facilitate expression as a fusion polypeptide, for example an immunoglobulin Fc region fusion polypeptide to ensure secretion. In such embodiments where flanking regions are included the flanking regions may comprise, for example, from 1-20, from 1-50, from 10-20, 20-30 or 40-50 amino acids. Flanking sequences may be included on either or both of the N terminal end or the C terminal end of a cross-reactive epitope peptide. The location of each cross-reactive epitope peptide in a native protein may be determined by referring to the Genbank/SWISS-PROT coordinates. In some embodiments, synthetic cross-reactive epitope peptides of the present disclosure comprise the entire proteins of which the cross-reactive epitope peptides identified by the specific SEQ ID NO is a part.

[0271] Also contemplated are polynucleotide and/or polypeptide sequences that have a high degree of homology to the cross-reactive epitope peptides (or polynucleotides and oligonucleotides encoding them) disclosed herein. One of skill in the art will appreciate that sequences provided herein can be altered, for example by substituting one or more amino acids in the sequences with a different sequence or in a flanking region. Such mutated or variant sequences are within the scope of the present disclosure. The substitutions may be conservative or non-conservative. Accordingly, in some embodiments, the present disclosure provides proteins, polypeptide and peptide sequences that share at least 70%, 71%, 72%, 73%, 74%, 75%, 75%, 76%, 77%, 78%, 79%, 80%, 81%, 82%, 83%, 84%, 85%, 86%,87%,88%, 89%, 90%, 91%, 92%, 93%, 94%, 95%, 96%, 97%, 98%, or 99% identity with a cross-reactive epitope (or a polypeptide or a polynucleotide comprising the cross-reactive epitope) set forth in Tables 13-23. In some embodiments, the variant sequences have about 1, 2, 3, 4, 5, 6, 7, 8, 9, or 10 amino acid substitutions, or a range of substitutions form about 1 to about 10 substitutions, for example, from about 1 to about 5 substitutions, about 2 to about 4 substitutions, about 3 to about 6 substitutions, about 4 to about 9 substitutions, etc.

[0272] In some embodiments, compositions of the present disclosure include one or more excipients as further described below.

### VII. VACCINES; T-CELL PEPTIDE THERAPY

[0273] In some embodiments, provided herein are vaccines comprising one or more of cross-reactive epitopes disclosed herein. In some embodiments, a vaccine is matched to a subject with a particular MHC haplotype. In some embodiments, a vaccine comprises one or more of the peptides or polypeptides disclosed herein and an adjuvant. In some embodiments, a vaccine comprises a recombinant or synthetic allergenic protein or a cross-reactive epitope peptide disclosed herein (for example, a cross-reactive epitope peptide that binds to at least one matched MHC/HLA). In some embodiments, a vaccine comprises one or more cross-reactive T-cell epitope peptides. In some embodiments, a vaccine comprises one or more B-cell epitope peptides and/or MHC-binding epitopes.

[0274] Contemplated vaccines may include a single peptide or protein or any combination of peptides or proteins. In some embodiments, a vaccine comprises a full-length cross-reactive allergenic protein or a polynucleotide or nucleic acid encoding the full-length cross-reactive allergenic protein. In some embodiments, a vaccine comprises two or more cross-reactive allergenic proteins.

[0275] Contemplated vaccines may be formulated for oral, parenteral, nasal, and/or topical administration to individuals in need thereof. Vaccines may be, for example, protein or peptide vaccines, or nucleotide vaccines (e.g., DNA vaccines, mRNA vaccines, etc.). Contemplated vaccines comprise one or more cross-reactive allergenic proteins and/or one or more cross-reactive epitope peptides of the present disclosure. Vaccines and compositions comprising the vaccines may, for example, be able to elicit an immune response in a subject, a biological sample or a cell (e.g., manifested by the presence (or absence where applicable) of an immune marker such as cross-reactive IgE and/or IgG antibody expression, cytokine release, T-cell anergy, etc.). Contemplated vaccines may, for example, provide immunogenic and/or immunotherapeutic compositions that may, for example, be able to induce tolerance in a subject, a biological sample or a cell (e.g., manifested by the presence (or absence where applicable) of an immune marker such as cross-reactive IgE and/or IgG antibody expression, cytokine release, T-cell anergy, etc.).

[0276] In some embodiments, a contemplated multiple allergen composition or vaccine may include at least 2, 3, 4, 5, 6, 8, 10, 15, 20, 25, 30, 40, 50, 60, 70, 80, 90, 100, 200, 300, 400, or 500 distinct cross-reactive allergenic proteins, peptides, or polynucleotides encoding the same. In some embodiments, a contemplated multiple allergen composition or vaccine may include two or more distinct cross-reactive allergenic proteins, peptides, or polynucleotides encoding the same. In some embodiments, contemplated multiple allergen composition or vaccine may include at least 6 distinct cross-reactive allergenic proteins, peptides, or polynucleotides encoding the same. In some embodiments, a composition or vaccine may include allergenic proteins selected from the group consisting of a shrimp allergen, a cod allergen, a salmon allergen, a hen's egg allergen, a cow's milk allergen, a peanut allergen, a sesame allergen, a soy allergen, a pecan allergen, a cashew allergen, a hazelnut allergen, a walnut allergen, a pistachio allergen, an almond allergen, and a wheat allergen. In some embodiments, a composition or vaccine may include identified allergens listed in Table 2. In some embodiments, a composition or vaccine may include proteins selected from the protein families provided in Table 3 or Table 4. In some embodiments, a composition or vaccine may include proteins selected from the Cupin family (Table 5, Table 10). In some embodiments, a composition or vaccine may include one or more of: Ber_e_2, Car_i_2, Fag_e_1, Fag_e_13S, Fag_t_13S_globulin, Jug_n_4, Lup_a_vicilin, Lup_an_1, Pin_k_2, Pis_s_1, Pis_s_2, Pis_v_2, Ses_i_3, Ses_i_6, Ses_i_7, Sin_a_2, Vig_r_2, Car_i_4, Gly_m_5, Gly_m_6, Jug_r_4, Len_c_1 and Pru_du_6.

[0277] In some embodiments, a contemplated multiple allergen composition or vaccine may include at least 2, 3, 4, 5, 6, 8, 10, 15, 20, 25, 30, 40, 50, 60, 70, 80, 90, 100, 200, 300, 400, 500, 600, 700, 800, 900, 1000, 2000, 3000, 4000, 5000, 6000, 7000, 8000, 9000, or 10,000 cross-reactive epitope peptides. In some embodiments, a contemplated multiple allergen composition or vaccine may include at most 2, 3, 4, 5, 6, 8, 10, 15, 20, 25, 30, 40, 50, 60, 70, 80, 90, 100, 200, 300, 400, 500, 600, 700, 800, 900, 1000, 2000, 3000, 4000, 5000, 6000, 7000, 8000, 9000 or 10,000 cross-reactive epitope peptides. In some embodiments, a composition or vaccine may include at least 4 distinct cross-reactive epitopes derived from a single allergenic protein or a single allergenic source (e.g., allergenic food source).

[0278] In some embodiments, a contemplated multiple allergen composition or vaccine may include at least 1, 2, 3, 4, 5, 6 7, 8, 9, 10, 12, 15, 20, 25, 30, 40, 50, 60, 70, 80, 90, or 100 or more cross-reactive epitope peptides from a single cross-reactive allergenic protein or an identified or reference allergenic protein. In some embodiments, a contemplated multiple allergen composition or vaccine may include at least 1, 2, 3, 4, 5, 6 7, 8, 9, 10, 12, 15, 20, 25, 30, 40, 50, 60, 70, 80, 90, or 100 or more cross-reactive epitope peptides from 2 or more distinct identified or reference allergenic proteins. In some embodiments, a contemplated multiple allergen composition or vaccine may include at least 1, 2, 3, 4, 5, 6 7, 8, 9, 10, 12, 15, 20, 25, 30, 40, 50, 60, 70, 80, 90, or 100 peptides from at least 6 distinct identified or reference allergenic proteins. In some embodiments, a contemplated multiple allergen composition or vaccine may include at least 1, 2, 3, 4, 5, 6 7, 8, 9, 10, 12, 15, 20, 25, 30, 40, 50, 60, 70, 80, 90, or 100 or more cross-reactive epitope peptides from 2 or more, 3 or more, 4 or more, 5 or more, 6 or more, 7 or more, 8 or more, 9 or more, 10 or more, 11 or more, 12 or more, 13 or more, 14 or more, or 15 or more of the allergenic proteins of Table 2. In some embodiments, a contemplated multiple allergen composition or vaccine may include at least 1, 2, 3, 4, 5, 6 7, 8, 9, 10, 12, 15, 20, 25, 30, 40, 50, 60, 70, 80, 90, or 100 or more cross-reactive epitope peptides from one or more food sources selected from the group consisting of shrimp, cod, salmon, hen's egg, cow's milk, peanut, sesame, soy, pecan, cashew, hazelnut, walnut, pistachio, almond, and wheat. In some embodiments, a contemplated multiple allergen composition or vaccine may include at least 1, 2, 3, 4, 5, 6 7, 8, 9, 10, 12, 15, 20, 25, 30, 40, 50, 60, 70, 80, 90, or 100 or more cross-reactive epitope peptides from one or more allergens selected from the group consisting of a shrimp allergen, a cod allergen, a salmon allergen, a hen's egg allergen, a cow's milk allergen, a peanut allergen, a sesame allergen, a soy allergen, a pecan allergen, a cashew allergen, a hazelnut allergen, a walnut allergen, a pistachio allergen, an almond allergen, and a wheat allergen.

[0279] In some embodiments, a contemplated multiple allergen composition or vaccine may include at least 1, 2, 3, 4, 5, 6 7, 8, 9, 10, 12, 15, 20, 25, 30, 40, 50, 60, 70, 80, 90, or 100 or more cross-reactive epitope peptides from 2 or more, 3 or more, 4 or more, 5 or more, 6 or more, 7 or more, 8 or more, 9 or more, 10 or more, 11 or more, 12 or more, 13 or more, 14 or more, or 15 or more distinct allergenic proteins. The allergenic proteins may, for example, be selected from one or more protein families (such as those listed in Table 3, Table 4). In some embodiments, a composition or vaccine comprises one or more Cupin protein family allergenic proteins or peptides. In some embodiments, a composition or vaccine may include at least 1, 2, 3, 4, 5, 6 7, 8, 9, 10, 12, 15, 20, 25, 30, 40, 50, 60, 70, 80, 90, or 100 or more cross-reactive epitope peptides from 2 or more, 3 or more, 4 or more, 5 or more, 6 or more, 7 or more, 8 or more, 9 or more, 10 or more, 11 or more, 12 or more, 13 or more, 14 or more, or 15 or more distinct cross-reactive Cupin allergenic proteins (e.g., those listed in Table 5 or 10). In some embodiments, a composition or vaccine comprises one or more cross-reactive epitope peptides derived from: Ber_e_2, Car_i_2, Fag_e_1, Fag_e_13S, Fag_t_13S_globulin, Jug_n_4, Lup_a_vicilin, Lup_an_1, Pin_k_2, Pis_s_1, Pis_s_2, Pis_v_2, Ses_i_3, Ses_i_6, Ses_i_7, Sin_a_2, Vig_r_2, Car_i_4, Gly_m_5, Gly_m_6, Jug_r_4, Len_c_1 or Pru_du_6, or any combination thereof. In some embodiments, a composition or vaccine includes 4 or more cross-reactive epitopes each a Cupin family protein (for example, from two or more, three or more, or up to 37 Cupin family proteins).

[0280] In some embodiments, the present disclosure provides a vector comprising a polynucleotide and/or an oligonucleotide that encodes a cross-reactive allergenic protein (for example, a cross-reactive allergenic protein disclosed herein) and/or a cross-reactive epitope peptide (for example, a cross-reactive epitope peptide disclosed herein). In some embodiments, the present disclosure provides a cell (for example, a host cell) comprising a contemplated vector.

### VIII. PREPARATION OF PROTEINS, PEPTIDES AND VACCINES

[0281] Cross-reactive allergenic proteins and/or cross-reactive epitope peptides may be prepared using any suitable method provided herein or known in the art.

[0282] Chemical peptide synthesis methods are well described and peptides can be ordered from companies such as Applied Biosystems, and others. Peptide synthesis can be performed as either solid phase peptide synthesis (SPPS) or solution phase peptide synthesis. The best known SPSS methods are t-Boc and F-moc solid phase chemistry. During peptide synthesis several protecting groups may, for example, be used. For example, hydroxyl and carboxyl functionalities may, for example, be protected by t-butyl group; lysine and tryptophan may, for example, be protected by t-Boc group; asparagine, glutamine cysteine and histidine may, for example, be protected by trityl group; and arginine may, for example, be protected by pbf group. In some embodiments, such protecting groups are left on the peptide after synthesis.

[0283] Peptides may, for example, be linked together to form longer peptides (for example to include two or more cross-reactive T-cell epitopes) using chemoselective coupling of unprotected peptide fragments (as described by Kent et al. (1992) Int. J. Pept. Protein Res. 40:180-193 and reviewed in Tam et al. (2001) BioPolymers 60:194-205) which provides the potential to achieve protein synthesis beyond the scope of SPPS. Many proteins and peptides of length 100-300 have been synthesized by this method.

[0284] Alternatively, cross-reactive allergenic proteins and/or cross-reactive epitope peptides of the present disclosure may be synthesized using traditional biochemical purification methods and/or by recombinant technology, using nucleic acid molecules which encode cross-reactive allergenic proteins and/or cross-reactive epitope peptides of the present disclosure. Such nucleic acid molecules (e.g., DNA molecules) maybe readily prepared using an automated synthesizer (e.g., an automated DNA synthesizer) utilizing the well-known codon-amino acid relationship of the genetic code.

[0285] Amino acid sequences of cross-reactive allergenic proteins and/or cross-reactive epitope peptides of the present disclosure may be reverse translated into corresponding nucleic acid sequences or nucleic acid sequences may be obtained from Genbank/SwissProt and other databases. Nucleic acid sequences may be optimized by applying codon optimization techniques known in the art for particular expression systems to be used. Polynucleotide sequences encoding cross-reactive allergenic proteins and/or cross-reactive epitope peptides may be cloned into an appropriate expression vector and expressed in a host cell. Suitable host cells include bacteria (e.g., E. coli), fungal cells (e.g., S. cerevisiae), insect cells (e.g., Sf9, Sf21, Hi5 cell lines), animal cells (e.g., CHO, HEK293, HeLA), and plant cells (e.g., N. tabacum, A. thaliana), and the like.

[0286] Methods well known to one of skill in the art may be used to construct cloning vectors containing nucleic acid sequence encoding allergenic proteins of the present disclosure, and other transcriptional and translational control elements. Exemplary techniques are described in Sambrook et al. (1989) Molecular Cloning, a Laboratory Manual, Cold Spring Harbor Press, Plainview N.Y.; Ausubel et al. (1989) Current Protocols in Molecular Biology, John Wiley & Sons, New York, N.Y.; and Green et al. (1997) Genome Analysis, A Laboratory Manual, Cold Spring Harbor Press, Plainview N.Y. In some cases, sequences generated by methods of the present disclosure may be synthetically manufactured prior to cloning into expression vectors. Polynucleotides may be provided in the form of expression cassettes which include control sequences operably linked to the inserted sequences. Expression cassettes in turn are typically provided within vectors (e.g., plasmids, or recombinant viral vectors) which may, for example, be suitable for use as reagents for nucleic acid immunization. Such an expression cassette may be administered to a host subject. In some embodiments, a polynucleotide is prepared and administered using a genetic vector. Suitable vectors may be any vectors which are capable of carrying a sufficient amount of genetic information and allowing expression of a protein, polypeptide, and/or peptide of the present disclosure.

[0287] The present disclosure provides expression vectors comprising disclosed polynucleotide sequences. The present disclosure also provides a vector for use in preventing or treating an allergy (e.g., a food allergy) or a food-intolerance comprising four or more polynucleotide sequences which each encode a different peptide, polypeptide, and/or protein described herein. A contemplated vector may, for example, comprise 4, 5, 6, 7, 8 or more polynucleotide sequences which encode different peptides, polypeptides, and/or proteins of the present disclosure.

[0288] Vectors, e.g., plasmid vectors will typically have appropriate initiators, promotors, enhancers, and other elements such as polyadenylation signals which may be necessary and which are positioned in the correct orientation in order to allow for expression of a protein, polypeptide, a peptide of the present disclosure. Proteins, polypeptides, and peptides of the present disclosure may be provided by delivering such a vector to a cell and allowing expression to occur from the vector. In some embodiments, a polynucleotide of the present disclosure is operably linked to a control sequence which is capable of providing for expression of a coding sequence by a host cell.

[0289] Cross-reactive allergenic proteins and/or cross-reactive epitope peptides may, for example, be prepared using a variety of synthetic or enzymatic schemes known in the art. Where short peptides are desired, such peptides may, for example, be prepared using automated peptide synthesis in solution or in solid support in accordance with conventional techniques. Various automated synthesizers are commercially available and may, for example, be used in accordance with known protocols and manufacturers' instructions. See, for example, Stewart and Young, Solid Phase Peptide Synthesis, 2d. ed., Pierce Chemical Co., (1984); Tam et al., J. Am. Chem. Soc., 105:6442, (1983); Merrifield, Science, 232: 341-347, (1986); Barany and Merrifield, The Peptides, Gross and Meienhofer, eds, Academic Press, New York, 1-284, (1979); Fields, (1997) Solid-Phase Peptide Synthesis. Academic Press, San Diego.); Andersson et al., Large-scale synthesis of peptides. Biopolymers (Pept. Sci.), 55, 227-250 (2000); Burgess et al., DiSSiMiL: Diverse Small Size Mini-Libraries applied to simple and rapid epitope mapping of a monoclonal antibody. J. Pept. Res., 57, 68-76, (2001); and Peptides for the New Millennium, Fields, J. P. Tam & G. Barany (Eds.), Kluwer Academic Publisher, Dordrecht.

[0290] Cross-reactive allergenic proteins and/or cross-reactive epitope peptides may, for example, also be modified, and such modification may be carried out on a synthesizer with minor modifications. For example, an amide could be added at the C-terminus of a peptide; an acetyl group could be added to the N-terminus of a peptide; and/or biotin, stearate, and other modifications could also be added to the N-terminus of a peptide.

[0291] Cross-reactive allergenic proteins and/or cross-reactive epitope peptides may, for example, be expressed in bacteria, such as lactococcus and lactobacillus, or in virus or virus-like particles, for example, for use as vaccines.

[0292] In some embodiments, cross-reactive allergenic proteins and/or cross-reactive epitope peptides are incorporated into other carriers known in the art. For example, cross-reactive allergenic proteins and/or cross-reactive epitope peptides may be conjugated or otherwise attached to a carrier protein, such as keyhole limpet hemocyanin (KLH), bovine serum albumin, ovalbumin, thyroglobulin, etc. In other embodiments, cross-reactive allergenic proteins and/or cross-reactive epitope peptides may be fused to an Fc region of an immunoglobulin, for example, for delivery to a mucosal site bearing corresponding receptors.

[0293] Cross-reactive allergenic proteins and/or cross-reactive epitope peptides of the present disclosure may be administered as part of a single allergen therapy or multiple allergen therapy. Cross-reactive allergenic proteins and/or cross-reactive epitope peptides may be administered as a primary therapy or as adjuvant therapy to another therapy. Cross-reactive allergenic proteins and/or cross-reactive epitope peptides may be administered to treat a target or primary food allergy or food intolerance or a cross-reactive epitope-sensitive condition.

[0294] Vaccines of the present disclosure may be prepared, for example, by combining one or more cross-reactive peptides with a pharmaceutically acceptable carrier. Methods for preparation of such compositions are further described below.

### IX. BINDING PARTNERS; ANTIBODIES

[0295] In one aspect, the present disclosure relates to the identification of antigen binding proteins or binding partners that recognize and bind to one or more cross-reactive allergenic proteins and/or cross-reactive epitopes of the present disclosure. A binding partner may be any agent that recognizes and binds to one or more cross-reactive allergenic proteins and/or cross-reactive epitopes of the present disclosure. Examples of binding partners include, but are not limited to, antibodies, B-cell receptor (BCR) expressing cells (e.g., B-cells, host cells expressing BCRs), T-cell receptor (TCR) expressing cells (e.g., T-cells, host cells expressing TCRs, etc.), MHC-expressing cells (e.g., MHC-I/HLA-I- or MHC-II/HLA-II-expressing cells) such as monocytes, antigen presenting cells (APC) such as macrophages, dendritic cells, B-cells, non-professional APCs, etc., and the like. In some embodiments, a binding partner is a B-cell receptor expressing cell such as a B-cell or a host cell expressing a B-cell receptor. In other embodiments, a binding partner is an MHC-expressing cell such as an antigen presenting cell (e.g. monocytes, macrophages, dendritic cells, non-professional APCs known in the art, and the like). In some embodiments, a binding partner is an antibody.

[0296] It is contemplated that cross-reactive allergenic proteins and/or cross-reactive epitope peptides (e.g., B-cell epitopes, MHC-binding epitopes, and/or T-cell epitopes) which are recognized and specifically bound by binding partners may, for example, be identified by in silico methods described herein. Accordingly, provided herein in some embodiments are assays or methods for identifying antibodies that bind (e.g., specifically bind) to one or more cross-reactive allergenic proteins and/or peptides (e.g., including a B-cell epitope, T-cell epitope, and/or MHC-binding epitope). In some embodiments, contemplated methods identify antibodies (e.g., specific antibodies) that bind to B-cell epitope peptides.

[0297] In some embodiments, provided herein are methods of identifying one or more antibodies (e.g., specific IgE or specific IgG antibodies) that, for example, are useful for the detection of allergenic food antigens and/or cross-reactive non-food allergens. Contemplated methods comprise: correlating one or more allergenic proteins with other allergenic proteins in the same protein family to identify cross-reactive B-cell epitope peptides; and identifying IgE or IgG antibodies (e.g., specific IgE or specific IgG antibodies) that bind to identified cross-reactive B-cell epitope peptides. One or more allergenic proteins may, for example, be correlated with other allergenic proteins in the same protein family to identify cross-reactive specific B-cell epitope peptides by providing a map of identified proteins in the same protein family, mapping full-length homology within a protein family to identify cross-reactive proteins, and/or mapping homology of cross-reactive proteins at the T-cell or B-cell epitope level. In some embodiments, a map of pairwise identity and similarity between an allergenic protein and other allergenic proteins within the same protein family is generated to identify cross-reactive allergenic proteins. The present disclosure provides in silico methods for determining MHC binding potential of T-cells. Exemplary MHC-II-binding T-cell epitopes (Tables 13-18, 20, and 22) and B-cell epitopes (Tables 19, 21, and 23) are provided to which one or more binding partners may bind, for example, specific antibodies such as IgE and/or IgG.

[0298] In some embodiments, a binding partner (e.g., an IgE or IgG antibody, e.g., a specific IgE or IgG antibody) may recognize and bind to one or more allergenic proteins present in a protein family selected from the group consisting of: Tropomyosin, EF hand family (Beta-parvalbumin), ATP:guanido phosphotransferase (Arginine Kinase), Triosephosphate isomerase, Fructose bisphosphate aldolase class I, Alpha/beta casein, Lipocalin, Kappa-casein, Transferrin, C-type lysozyme/alpha-lactalbumin family, Serum albumin, Enolase, Serpin serine protease inhibitor, Kazal-type serine protease inhibitor, Collagen, Lipoprotein, Prolamin superfamily, Cupin, Profilin, Bet v 1 family, Oleosin, Isoflavone reductase family, Plant defensin, 60S acidic ribosomal protein, Heat shock protein Hsp70, Fe/Mn superoxide dismutase, Papain-like cysteine protease, Thaumatin-like protein, Unclassified, GILT family, Hevein-like and class I/II chitinase, Zinc finger, C3HC4 type (RING finger), SCAI family, Peroxidase, Serpin serine protease inhibitor, Thionin, Thioredoxin, Transcription elongation factor 1, Lipid transfer protein, and Triosephosphate isomerase protein family, or any combination thereof (Table 3).

[0299] In some embodiments, a binding partner (e.g., an IgE or IgG antibody, e.g., a specific IgE or IgG antibody) may recognize and bind to one or more allergenic proteins selected from the group consisting of a shrimp allergen, a cod allergen, a salmon allergen, a hen's egg allergen, a cow's milk allergen, a peanut allergen, a sesame allergen, a soy allergen, a pecan allergen, a cashew allergen, a hazelnut allergen, a walnut allergen, a pistachio allergen, an almond allergen, and a wheat allergen. In some embodiments, a binding partner (e.g., an IgE or IgG antibody, e.g., a specific IgE or IgG antibody) may recognize and bind one or more specific allergenic proteins provided in Table 2.

[0300] In some embodiments, a binding partner (e.g., an IgE or IgG antibody, e.g., a specific IgE or IgG antibody) may recognize and bind to one or more cross-reactive allergenic proteins set forth in Tables 4-7 and/or 10-12. In some embodiments, a binding partner (e.g., an IgE or IgG antibody, e.g., a specific IgE or IgG antibody) may recognize and bind to one or more Cupin protein selected from the group consisting of: Pru du 6, Jug n 2, Jug n 4, Ana o 1, Ana o 2, Jug r 2, Jug r 4, Cor a 11, Cor a 9, Ara h 1, Ara h 3, Car i 2, Car i 4, Pis v 2, Pis v 3, Pis v 5, Ses i 3, Ses i 6, Ses i 7, Gly m 5, Gly m 6, Gly m Bd, Ber e 2, Coc n 1, Fag e 13s globulin, Fag e 3, Fag e legumin, Pis s 1, Pis s 2, Act d 12, Pin k 2, Len c 1, Vig r 2, Lup an 1, Fag t 13S globulin, Lup a vicilin, and Sin a 2. In some embodiments, a binding partner (e.g., an IgE or IgG antibody, e.g., a specific IgE or IgG antibody) may recognize and bind to one or more cross-reactive allergenic proteins or peptides set forth in Tables 4-7 and 10-23.

[0301] In some embodiments, a binding partner (e.g., an IgE or IgG antibody, e.g., a specific IgE or IgG antibody) may recognize and bind to a single cross-reactive allergenic protein. In some embodiments, a binding partner (e.g., an IgE or IgG antibody, e.g., a specific IgE or IgG antibody) may recognize and bind to two or more cross-reactive allergenic proteins.

[0302] In some embodiments, a binding partner (e.g., an IgE or IgG antibody, e.g., a specific IgE or IgG antibody) may recognize and bind to one or more of: a cross-reactive B-cell epitope peptides, an MHC-binding epitope peptides, and/or a T-cell epitope peptide. In some embodiments, a binding partner may recognize and bind one or more cross-reactive B-cell epitope peptides derived from a cross-reactive allergenic protein. In some embodiments, a binding partner may recognize and bind a B-cell epitope on a cross-reactive allergenic protein set forth in Tables 19, 21, and 23. In some embodiments, a binding partner may recognize and bind one or more cross-reactive T-cell epitope peptides derived a cross-reactive allergenic protein. In some embodiments, a binding partner may recognize and bind one or more cross-reactive MHC-binding epitope peptides derived from a cross-reactive allergenic protein. In some embodiments, a binding partners may recognize and bind an MHC-II binding T-cell epitope on a cross-reactive allergenic protein set forth in Tables 13-18, 20, and 22. In some embodiments, a binding partner (e.g., an IgE or IgG antibody, e.g., a specific IgE or IgG antibody) may recognize and bind to 2 or more, 3 or more, 4 or more, 5 or more, 6 or more, 7 or more, or 8 or more of such cross-reactive epitopes.

[0303] In some embodiments, a binding partner may recognize and bind two or more B-cell epitope peptides, MHC-binding epitope peptides, and/or T-cell peptides derived from two or more cross-reactive allergenic proteins. In some embodiments, a binding partner may recognize and bind a peptide comprising a B-cell epitope and/or an MHC-II-binding T-cell epitope set forth in Tables 13-23. In some embodiments, a binding partner (e.g., an IgE or IgG antibody, e.g., a specific IgE or IgG antibody) may recognize and bind to one or more peptides comprising cross-reactive B-cell epitopes, MHC-binding epitopes, and/or T-cell epitopes derived from one or more Cupin proteins selected from the group consisting of: Pru du 6, Jug n 2, Jug n 4, Ana o 1, Ana o 2, Jug r 2, Jug r 4, Cor a 11, Cor a 9, Ara h 1, Ara h 3, Car i 2, Car i 4, Pis v 2, Pis v 3, Pis v 5, Ses i 3, Ses i 6, Ses i 7, Gly m 5, Gly m 6, Gly m Bd, Ber e 2, Coc n 1, Fag e 13s globulin, Fag e 3, Fag e legumin, Pis s 1, Pis s 2, Act d 12, Pink 2, Len c 1, Vig r 2, Lup an 1, Fag t 13S globulin, Lup a vicilin, and Sin a 2.

[0304] In some embodiments, a binding partner (e.g., an IgE or IgG antibody, e.g., a specific IgE or IgG antibody) may recognize and bind to a food allergenic antigen. In some embodiments, a binding partner may recognize and bind to a non-food allergenic antigen, for example, a cross-reactive allergenic protein and/or a cross-reactive epitope peptides, for example, those disclosed in Table 8, and/or are disclosed herein.

[0305] In one aspect, the present disclosure provides antibodies (e.g., IgE or IgG antibodies, e.g., specific IgE or IgG antibodies) that bind a particular cross-reactive allergenic protein and/or a peptide comprising a cross-reactive epitope (e.g., a B-cell epitope, MHC-binding epitope, and/or T-cell epitope). In some embodiments, an antibody binds an allergenic protein (such as an allergenic protein present in foods, for example, those provided in Table 1 and/or Table 8) or a peptide comprising a cross-reactive B-cell epitope, MHC-binding epitope, and/or a T-cell epitope derived from an allergenic protein. In some embodiments, an antibody binds to a peptide comprising a cross-reactive B-cell epitope, an MHC-binding epitopes, and/or T-cell epitope present on a particular or specific cross-reactive non-food allergenic protein (for example, those provided in Table 8 as well as those that may be identified by the methods provided herein).

[0306] In some embodiments, provided herein are antibodies that bind (e.g., specifically bind) one or more cross-reactive allergenic proteins and/or peptides comprising a cross-reactive B-cell epitope, MHC-binding peptide, and/or T-cell epitope derived from a cross-reactive allergenic protein. In some embodiments, an antibody binds (e.g., specifically binds) an identified or reference allergenic protein. In some embodiments, an antibody binds (e.g., specifically binds) a cross-reactive allergenic protein. In some embodiments, an antibody binds (e.g., specifically binds) a cross-reactive epitope on an allergenic protein provided in Table 2. In some embodiments, an antibody binds (e.g., specifically binds) one or more allergenic proteins selected from the group consisting of a shrimp allergen, a cod allergen, a salmon allergen, a hen's egg allergen, a cow's milk allergen, a peanut allergen, a sesame allergen, a soy allergen, a pecan allergen, a cashew allergen, a hazelnut allergen, a walnut allergen, a pistachio allergen, an almond allergen, and a wheat allergen, or a cross-reactive B-cell epitope, MHC-binding epitope, and/or T-cell epitope derived from any of the foregoing.

[0307] In some embodiments, an antibody binds (e.g., specifically binds) a cross-reactive allergenic protein listed in Table 3. In some embodiments, an antibody binds (e.g., specifically binds) a cross-reactive epitope on a Cupin protein (for example, listed in Table 5 or Table 10). In some embodiments, an antibody binds (e.g., specifically binds) one or more cross-reactive allergenic proteins present in a protein in tropomyosin, prolamin, lipid transfer protein, profilin, EF-Hand family, or Bet v 1 protein families (Table 4). In some embodiments, an antibody binds (e.g., specifically binds) a cross-reactive epitope and/or cross-reactive allergenic protein that may be identified by methods disclosed herein. In some embodiments, an antibody binds (e.g., specifically binds) to one or more cross-reactive B-cell epitopes provided in Tables 19, 21, and 23, and/or cross-reactive MHC-binding T-cell epitopes provided in Tables 13-18, 20, and 22.

[0308] In some embodiments, an antibody binds (e.g., specifically binds) a cross-reactive allergenic protein at a non-cross-reactive B-cell epitope, MHC-binding epitope, and/or T-cell epitopes derived from a cross-reactive allergenic proteins (for example, an epitope that is located on a cross-reactive allergenic protein, identified allergenic protein, or reference allergenic protein, but is not shared by or common to two or more allergenic proteins). For example, a contemplated antibody recognizes the cross-reactive allergenic protein Ana_o_2 but no other allergenic protein within the Cupin protein family.

[0309] In some embodiments, an antibody binds (e.g., specifically binds) B-cell epitopes, MHC-binding epitopes, and/or T-cell epitopes on one or more allergenic Cupin proteins (for example, listed in Table 5 or Table 10). In some embodiments, an antibody binds (e.g., specifically binds) B-cell epitopes, MHC-binding epitopes, and/or T-cell epitopes on one or more Cupin proteins selected from the group consisting of: Pru du 6, Jug n 2, Jug n 4, Ana o 1, Ana o 2, Jug r 2, Jug r 4, Cor a 11, Cor a 9, Ara h 1, Ara h 3, Car i 2, Car i 4, Pis v 2, Pis v 3, Pis v 5, Ses i 3, Ses i 6, Ses i 7, Gly m 5, Gly m 6, Gly m Bd, Ber e 2, Coc n 1, Fag e 13s globulin, Fag e 3, Fag e legumin, Pis s 1, Pis s 2, Act d 12, Pin k 2, Len c 1, Vig r 2, Lup an 1, Fag t 13S globulin, Lup a vicilin, and Sin a 2. In some embodiments, an antibody binds (e.g., specifically binds) bind B-cell epitopes, MHC-binding epitopes, and/or T-cell epitopes on one or more cross-reactive allergenic protein listed in Table 10. In some embodiments, B-cell epitopes, MHC-binding epitopes, and/or T-cell epitopes bound antibodies of the present disclosure are cross-reactive epitopes.

[0310] Contemplated antibodies can be of various isotypes, including, but not limited to: IgG (e.g., IgG1, IgG2, IgG2a, IgG2b, IgG2c, IgG3, IgG4); IgM; IgA1; IgA2; IgAsec; IgD; and IgE. In some embodiments, an antibody is an IgG isotype. In other embodiments, an antibody is an IgE isotype. Antibodies can be full-length (e.g., a full-length IgG1, IgG2, IgG3, or IgG4 antibody) or can include only a fragment or an analog thereof. The terms ‘full-length antibody’, ‘intact antibody’, and ‘whole antibody’ are used interchangeably to refer to an antibody in its substantially intact ‘native’ form, not antibody fragments as defined above. The terms particularly refer to an antibody with heavy chains that each comprise a variable domain and an Fc region.

[0311] A contemplated antibody may be an isolated polyclonal antibody, which has been raised against cross-reactive allergenic proteins and/or epitope peptides (e.g., B-cell epitope peptides and/or T-cell epitope peptides) of the present disclosure. Polyclonal antibodies can be obtained from any mammalian species of convenience: an antibody can, e.g., be isolated from a rabbit, mouse, rat, cat, dog, horse, cow, camel, llama, or even a human being.

[0312] A contemplated antibody may be a monoclonal antibody which binds (e.g., specifically binds) a cross-reactive allergenic protein or peptide of the present of the present disclosure. An antibody may be, for example, a chimeric, a humanized or a human antibody. In some embodiments, a humanized antibody is a human immunoglobulin (recipient antibody) in which HVR residues of the recipient antibody are replaced by residues from an immunoglobulin HVR of a non-human species (donor antibody) such as mouse, rat, rabbit, or nonhuman primate. In some embodiments, framework (FR) residues of a human recipient antibody are replaced by corresponding non-human residues. Furthermore, humanized antibodies may comprise residues that are not found in a recipient antibody or in a donor antibody. The term ‘monoclonal antibody’ refers to an antibody obtained from a population of substantially homogeneous antibodies, in that the individual antibodies comprising the population are identical except for possible mutations, such as naturally occurring mutations, that may be present in minor amounts. Thus, the modifier ‘monoclonal’ indicates the character of the antibody as not being a mixture of discrete antibodies. In contrast to polyclonal antibody preparations, which typically include different antibodies directed against different determinants (epitopes), each monoclonal antibody of a monoclonal antibody preparation is directed against the same single determinant on an antigen.

[0313] A contemplated antibody may also be presented in the form of a “derivative”, wherein one or more of the amino acids of an antibody, a fragment, or an analogue are chemically modified, e.g., by alkylation, PEGylation, acylation, ester formation or amide formation or the like, e.g., for linking an antibody to a second molecule. This includes, but is not limited to, PEGylated antibodies, cysteine-PEGylated antibodies, and variants thereof.

[0314] In addition to methods of identifying binding partners for cross-reactive allergenic proteins and/or epitope peptides derived from cross-reactive allergenic proteins, the present disclosure also provides antibodies that bind one or more cross-reactive allergenic proteins or epitope peptides derived from cross-reactive allergenic proteins. Such specific antibodies may, for example, be useful as immunotherapeutics, and in assays for identifying the presence of allergic diseases, the presence of specific foods or cross-reactive non-food allergens in subjects, and for potency testing of immunotherapeutic compositions.

[0315] Traditionally, antibodies have been developed to neutralize only single allergens. However, the present disclosure provides, for example, methods, compositions and kits that include antibodies that neutralize particular cross-reactive allergenic proteins. In some embodiments, antibodies neutralize at least two cross-reactive allergenic proteins. In some embodiments, antibodies neutralize a single cross-reactive allergenic protein.

[0316] In some embodiments, contemplated antibodies have an affinity (Kd) of less than 10⁻⁶, 10⁻⁷, 10⁻⁸, 10⁻⁹, 10⁻¹⁰, 10⁻¹¹, or 10⁻¹². In some embodiments, an antibody binds to an antigen with a Kd of at least 3 μM, 2 μM, 1 μM, 900 nM, 800 nM, 700 nM, 600 nM, 500 nM, 400 nM, 300 nM, 200 nM, 100 nM, 50 nM, 1 nM, 900 μM, 800 μM, 700 μM, 600 μM, 500 μM, 400 μM, 300 μM, 200 μM, 100 μM, 50 μM, 1 μM, 900 fM, 800 fM, 700 fM, 600 fM, 500 fM, 400 fM, 300 fM, 200 fM, 100 fM, 50 fM, or 1 fM. In some cases antibodies may have a Kd of at most 3 μM, 2 μM, 1 μM, 900 nM, 800 nM, 700 nM, 600 nM, 500 nM, 400 nM, 300 nM, 200 nM, 100 nM, 50 nM, 1 nM, 900 μM, 800 μM, 700 μM, 600 μM, 500 μM, 400 μM, 300 μM, 200 μM, 100 μM, 50 μM, 1 μM, 900 fM, 800 fM, 700 fM, 600 fM, 500 fM, 400 fM, 300 fM, 200 fM, 100 fM, 50 fM, or 1 fM as measured by any suitable biochemical assay, including but not limited to surface plasmon resonance analysis using, for example, a BIACORE system and software. In some embodiments, a binding affinity is ≤500 nM Kd. In some embodiments, a binding affinity is ≤100 nM Kd. In some embodiments, a binding affinity is ≤50 nM Kd. In some embodiments, a binding affinity is ≤1 nM Kd.

[0317] In one aspect, the present disclosure provides methods for preparation of antibodies that bind to an epitope on a cross-reactive allergenic protein. In some embodiments, provided herein are methods for preparation of antibodies that bind (e.g., specifically bind) to cross-reactive epitopes on two or more cross-reactive allergenic proteins. In some embodiments, antibodies may be neutralizing antibodies, for example, for use as passive immunotherapeutics. In some embodiments, antibodies may be linked to food allergenic peptides to create multiple allergen immunotherapeutics. In some embodiments, may be used as diagnostic reagents, either alone or in combination with various tags including, but not limited to, fluorescent markers. In some embodiments, an antibody is a monoclonal antibody or a polyclonal antibody. In some embodiments, a monoclonal antibody prepared using the methods of the present disclosure is a murine antibody, a bovine antibody, a chimeric antibody, a humanized antibody, or a human antibody.

[0318] In a contemplated method, individual cross-reactive allergenic proteins and/or peptides may, for example, be selected and expressed as cell surface epitopes, for example, by selecting peptides which comprise transmembrane helices in regions flanking epitopes of interest and introducing them into continuous cell lines using a retroviral vector transfection method, such that the polypeptide epitopes are displayed on the surface of the mammalian cells and anchored by the flanking transmembrane domains. Further, if an underlying cell line used is syngeneic with the intended host to be immunized, an immune response may, for example, be directed primarily to allergenic cross-reactive peptides of interest, thereby simplifying the process of selecting a high affinity antibody directed to a cross-reactive allergenic peptide of interest.

[0319] Contemplated antibodies may be raised for example, in any species of interest, for example, in mice (most commonly the species used to prepare hybridomas), guinea pigs, goats, chickens and others. Such antibodies may, for example, then be harvested for experimental or therapeutic use without the need to further produce hybridomas. A cell line established for expression of a protein may be a preexisting continuous line as is the case for Balb/c mice in which the 3T3 line is available (ATCC reference) or may be a primary line e.g., of fibroblasts established from the species, or individual, intended for immunization.

[0320] Monoclonal antibodies may be, for example, prepared by methods known in the art, including production of hybridomas, use of humanized mice, combinatorial display techniques, and the like. See, e.g., of Kohler and Milstein, Nature, 256:495 (1975), Wood et al., WO 91/00906, Kucherlapati et al., WO 91/10741; Lonberg et al., WO 92/03918; Kay et al., WO 92/03917; N. Lonberg et al., Nature, 368:856-859 [1994]; L. L. Green et al., Nature Genet., 7:13-21 [1994]; S. L. Morrison et al., Proc. Nat. Acad. Sci. USA, 81:6851-6855 [1994]; Bruggeman et al., Immunol., 7:33-40 [1993]; Tuaillon et al., Proc. Nat. Acad. Sci. USA, 90:3720-3724 [1993]; and Bruggeman et al. Eur. J. Immunol., 21:1323-1326 [1991]); Sastry et al., Proc. Nat. Acad. Sci. USA, 86:5728 [1989]; Huse et al., Science, 246:1275 [1989]; and Orlandi et al., Proc. Nat. Acad. Sci. USA, 86:3833 [1989]); U.S. Pat. No. 5,223,409; WO 92/18619; WO 91/17271; WO 92/20791; WO 92/15679; WO 93/01288; WO 92/01047; WO 92/09690; WO 90/02809; Fuchs et al., Biol. Technology, 9:1370-1372 [1991]; Hay et al., Hum. Antibod. Hybridomas, 3:81-85 [1992]; Huse et al., Science, 46:1275-1281 [1989]; Hawkins et al., J. Mol. Biol., 226:889-896 [1992]; Clackson et al., Nature, 352:624-628 [1991]; Gram et al., Proc. Nat. Acad. Sci. USA, 89:3576-3580 [1992]; Garrad et al., Bio/Technolog, 2:1373-1377 [1991]; Hoogenboom et al., Nuc. Acid Res., 19:4133-4137 [1991]; and Barbas et al., Proc. Nat. Acad. Sci. USA, 88:7978 [1991].

[0321] Chimeric and humanized antibodies and fragments thereof such as scFvs may be prepared as described in e.g., Robinson et al., PCT/US86/02269; European Patent Application 184,187; European Patent Application 171,496; European Patent Application 173,494; WO 86/01533; U.S. Pat. No. 4,816,567; European Patent Application 125,023; Better et al., Science, 240:1041-1043 [1988]; Liu et al., Proc. Nat. Acad. Sci. USA, 84:3439-3443 [1987]; Liu et al., J. Immunol., 139:3521-3526 [1987]; Sun et al., Proc. Nat. Acad. Sci. USA, 84:214-218 [1987]; Nishimura et al., Canc. Res., 47:999-1005 [1987]; Wood et al., Nature, 314:446-449 [1985]; and Shaw et al., J. Natl. Cancer Inst., 80:1553-1559 [1988]), U.S. Pat. No. 5,225,539; Jones et al., Nature, 321:552-525 [1986]; Verhoeyan et al., Science, 239:1534 [1988]; and Beidler et al., J. Immunol., 141:4053 [1988]).

[0322] In some embodiments, contemplated methods involve the steps of obtaining a plurality of candidate antibody producing cells, contacting the plurality of candidate antibody-producing cells with cross-reactive allergenic proteins, polypeptides or peptides comprising B-cell epitopes and producing an antibody that binds (for example, specifically binds) to a target cross-reactive allergenic protein, polypeptide or peptide comprising a B-cell epitope, thereby identifying an antibody that binds (for example, specifically binds) to a target cross-reactive allergenic protein, polypeptide, peptide comprising a B-cell epitope.

[0323] In some embodiments, antibodies that bind an allergenic antigen can be prepared by contacting one or more specific allergenic antigens (for example immobilized on a substrate) with a biological sample (for example, peripheral blood mononuclear cells (PBMCs) or isolated B-cells) and identifying allergen-positive B-cells. Allergen-positive B-cells can be identified and isolated. Immunoglobulin genes can then be amplified from allergen-positive B cells using methods known in the art, for example, by performing RT-PCR protocols on a single B-cell using kits commercially available from Invitrogen/Life Sciences Technologies, CA, USA. Amplification products of a PCR process can be then sequenced to determine binding epitopes and variable and light chain sequences of antibodies. Paired immunoglobulin heavy and light chains can be selected after sequencing, and DNA encoding selected heavy and light chains may be purified with a commercially available PCR Purification Kit such as the QIAquick 96 PCT Purification from Qiagen. Host cells may be transformed with heavy and light chains for example, NEB® 5-alpha competent E. coli (New England Biolabs) may be transformed with heavy and light chain ligation products and grown followed by selection of transformed cells. Clones are then selected and screened for vector insertion of amplified immunoglobulin heavy and light chains. Vectors harboring insertions are then amplified and purified and plasmid DNA is then sequenced to determine similarity to previous sequences. Isolated plasmid DNA from selected heavy and light chains may be transfected into host cells (for example, HEK293T) using commercially available DNA transfection kits (for example from SignaGen, Rockville, Md.) according to manufacturer's protocols. Antibodies may then be purified from transfected cells according to standard techniques. Allergen specificity can be then validated by ELISA assay (ImmunoCAP) for purified recombinant antibodies according to manufacturer's protocols.

[0324] In some embodiments, yeast surface display using a DNA library can be performed as described previously (Chao, G. et al. (2006) Nat. Protoc. 1(2):755-68) or through used of substrate immobilized antigens to confirm specificity of antibodies.

[0325] Antibodies produced by and/or used in methods of the present disclosure may, for example, have binding affinities of about 1 fm to ≤about 3 μM. In some embodiments, antibodies produced by and/or used in the methods of the present disclosure have a binding affinity of less than 100 nM, less than 10 nM, or less than 2 nM, as measured by a surface-plasmon resonance assay e.g., BIACORE.

[0326] Antibodies that bind cross-reactive allergenic proteins and epitopes present on cross-reactive allergenic proteins may, for example, be used to prepare compositions and kits as described in further detail below.

### X. PHARMACEUTICAL COMPOSITIONS

[0327] The disclosure also provides compositions comprising one or more active ingredients (such as cross-reactive allergenic proteins and/or peptides, and/or polynucleotides encoding such cross-reactive allergenic proteins and/or peptides, and/or antibodies that recognize and bind any of the foregoing). In some embodiments, such compositions are pharmaceutically acceptable compositions.

[0328] In some embodiments, the present disclosure provides single allergen or multiple allergen immunotherapeutic compositions comprising a plurality (e.g., 2, 3, 4, 5, 6, 7, 8, 9, 10 or more, including, e.g., up to about 5000) of distinct cross-reactive epitope peptides (or polypeptides comprising the cross-reactive peptides) from one or more allergenic proteins (e.g., identified allergenic proteins and/or cross-reactive allergenic proteins).

[0329] Provided herein in various embodiments are methods for preparing a vaccine comprising cross-reactive allergenic protein or cross-reactive epitope peptides. Contemplated methods may include identifying a cross-reactive epitope from an identified allergenic protein or a cross-reactive allergenic protein as described herein, synthesizing a cross-reactive epitope peptide or a cross-reactive protein, and creating a single or multiple allergen immunotherapeutic composition that includes a cross-reactive epitope peptide or cross-reactive allergenic protein in a pharmaceutically acceptable carrier. In some embodiments, methods include adsorbing a cross-reactive protein or cross-reactive peptide on to an adjuvant suitable for administration to subjects, for example, aluminum hydroxide (alum).

[0330] In some embodiments, methods may include identifying 4 or more cross-reactive epitope peptides; synthesizing the 4 or more cross-reactive epitope peptides; and creating a single or multiple allergen immunotherapeutic composition that includes the 4 or more cross-reactive epitope peptides in a pharmaceutically acceptable carrier. In some embodiments, methods include identifying at least two distinct allergenic proteins, each comprising at least 4 cross-reactive epitopes; and synthesizing the at least two distinct allergenic proteins to create a multiple allergen immunotherapeutic composition. In some embodiments, methods include identifying 6 or more distinct allergenic proteins, each comprising at least 4 cross-reactive epitopes; and synthesizing the at least 6 distinct allergenic proteins to create a multiple allergen immunotherapeutic composition. In some embodiments, methods include adsorbing a cross-reactive protein or cross-reactive peptide on to an adjuvant suitable for administration to subjects, for example, aluminum hydroxide (alum).

[0331] In some embodiments, methods may include identifying at least 6 distinct identified allergenic proteins or at least 6 distinct cross-reactive allergenic proteins; synthesizing the at least 6 distinct identified allergenic proteins or at least 6 distinct cross-reactive allergenic proteins; and creating a multiple allergen immunotherapeutic composition that includes the at least 6 distinct identified allergenic proteins or at least 6 distinct cross-reactive allergenic proteins in a pharmaceutically acceptable carrier. In some embodiments, methods include adsorbing a cross-reactive protein or cross-reactive peptide on to an adjuvant suitable for administration to subjects, for example, aluminum hydroxide (alum).

[0332] In some embodiments, methods may include identifying one or more cross-reactive epitopes from one or more identified allergenic proteins and/or one or more cross-reactive allergenic proteins as described above, synthesizing peptides comprising the one or more cross-reactive epitopes (or polypeptides comprising the one or more cross-reactive epitopes), and creating a multiple allergen immunotherapeutic composition that includes the one or more cross-reactive epitope peptides (or polypeptides comprising the one or more cross-reactive epitopes) in a pharmaceutically acceptable carrier. Methods may include identifying four or more cross-reactive epitopes from one or more identified allergenic proteins and/or one or more cross-reactive allergenic proteins as described above, synthesizing peptides comprising the four or more cross-reactive epitopes (or polypeptides comprising the four or more cross-reactive epitopes), and creating a multiple allergen immunotherapeutic composition that includes the four or more cross-reactive epitope peptides (or polypeptides comprising the four or more cross-reactive epitopes) in a pharmaceutically acceptable carrier. In some embodiments, the methods include identifying one or more (or four or more) cross-reactive epitopes from at least 6 distinct identified allergenic proteins and/or one or more cross-reactive allergenic proteins as described above to prepare multiple allergen immunotherapeutic compositions as described above.

[0333] Contemplated methods for creating single and multiple allergen immunotherapeutic compositions include, for example, determining and mapping cross-reactive epitopes (e.g., B-cell epitopes, T-cell epitopes, and/or MHC-binding T-cell epitopes) located in each of one or more allergenic proteins (e.g., one or more identified allergenic proteins such as those present in a multiple allergen oral immunotherapeutic composition) to other allergenic proteins within a protein family as described herein to identify cross-reactive epitopes, and selecting one or more identified cross-reactive T-cell epitopes. In some embodiments, homology of at least 70% identity over at least 80% coverage over a peptide is a criterion used for identification and/or mapping of a cross-reactive epitopes on an allergenic protein. In some embodiments, homology of at least 80% identity over at least 70% coverage over a peptide is a criterion used for identification and/or mapping of a cross-reactive epitope on an allergenic protein.

[0334] In some embodiments, provided herein are methods for preparing a multiple allergen oral immunotherapeutic composition that, for example, is capable of treating an allergy to one or more cross-reactive allergenic proteins, for example, an allergy to one or more cross-reactive allergenic proteins that are not present in the multiple allergen oral immunotherapeutic composition. Contemplated methods may, for example, include: (a) mapping one or more identified allergenic proteins present in a multiple allergen oral immunotherapy to full length homology of other allergenic proteins within a protein domain family; (b) identifying cross-reactive allergenic proteins with the identified allergenic proteins as described herein (e.g., based on homology by pairwise identity and similarity and/or or cross-reactivity prediction between the pair of sequences); (c) correlating one or more identified allergenic proteins with other allergenic proteins in the same protein domain family; and/or (d) selecting two or more identified allergenic proteins as a component in the multiple allergen oral immunotherapy, for example, if there is at least 70% homology or an A-RISC cross-reactivity score of ≥0.5 with two or more identified cross-reactive allergenic proteins. In some embodiments, methods for preparing a multiple allergen oral immunotherapeutic composition comprises a computer-implemented method for performing steps (a)-(d) as described herein. In some embodiments, the methods further include determining and mapping cross-reactive epitopes on the two or more identified allergenic proteins and two or more identified cross-reactive allergenic proteins. For example, in an embodiment, two or more identified allergenic proteins in a food source are mapped as described above to each of the additional allergenic proteins within a protein family (such as an identified protein family) to which these two or more identified allergenic proteins belong, comparing each additional allergenic protein and an identified allergenic protein (reference protein) to determine homology by pairwise identity and similarity, determining a cross-reactivity score for each of the additional allergenic protein within the protein family with respect to a reference protein (an identified allergenic protein or another additional allergenic proteins within the same protein family) and identifying as cross-reactive allergenic proteins those additional allergenic proteins that have a cross-reactivity score of ≥0.5-1 with respect to a reference protein. In some embodiments, mapping comprises i) providing a dataset of full-length sequences of identified allergenic proteins; ii) inputting the dataset into a computer readable medium; iii) searching the dataset of sequences using an alignment algorithm such as a BLAST, BLATP, TBLASTN, FASTA, etc., to identify other allergenic proteins having a minimal acceptable homology based on identity and similarity of at least 70% or an A-RSC cross-reactivity score of ≥0.5 with respect to the identified allergenic proteins to identify cross-reactive allergenic proteins.

[0335] In some embodiments, the methods comprise mapping the allergenic proteins present in any of the protein families provided in Table 3. In some embodiments, the methods comprise the mapping one or more of the identified allergenic protein selected from the group consisting of a shrimp allergen, a cod allergen, a salmon allergen, a hen's egg allergen, a cow's milk allergen, a peanut allergen, a sesame allergen, a soy allergen, a pecan allergen, a cashew allergen, a hazelnut allergen, a walnut allergen, a pistachio allergen, an almond allergen, and a wheat allergen. In some embodiments, the methods comprise the mapping the identified allergenic proteins set forth in Table 2. In some embodiments, the methods further include identifying specific antibodies that bind to identified cross-reactive epitopes of the present disclosure. In some embodiments, the methods further include identifying specific antibodies that bind to one or more of the cross-reactive epitopes present in allergenic proteins present in Table 3.

[0336] In some embodiments, the methods comprise preparing a multiple allergen oral immunotherapeutic composition comprising three or more allergenic proteins or cross-reactive epitopes present on three or more allergenic proteins selected from any of the identified protein families listed in Table 3. In some embodiments, the three or more allergenic proteins included in a multiple allergen oral immunotherapeutic composition are selected from the Cupin protein family, the tropomyosin protein family, the prolamin protein family, the lipid transfer protein family, the EF hand protein family, and the Bet v 1 protein family.

[0337] Accordingly, in some embodiments the methods comprise preparing a multiple allergen oral immunotherapeutic composition comprising three or more Cupin family proteins, three or more Tropomyosin family proteins, three or more Prolamin family proteins, three or more Lipid transfer protein family proteins, three or more EF hand family proteins, or three or more Bet v 1 family proteins, and a pharmaceutically acceptable excipient. In some embodiments, the methods comprise preparing a multiple allergen oral immunotherapeutic composition comprising three or more Cupin family proteins selected from Table 5 or Table 10.

[0338] In some embodiments, the methods comprise preparing a multiple allergen oral immunotherapeutic composition comprising three or more Cupin family proteins selected from Ber_e_2, Car_i_2, Fag_e_1, Fag_e_13S, Fag_t_13S_globulin, Jug_n_4, Lup_a_vicilin, Lup_an_1, Pin_k_2, Pis_s_1, Pis_s_2, Pis_v_2, Ses_i_3, Ses_i_6, Ses_i_7, Sin_a_2, Vig_r_2, Car_i_4, Gly_m_5, Gly_m_6, Jug_r_4, Len_c_1, and Pru_du_6. In some embodiments, the methods further include identifying specific antibodies that bind to one or more of cross-reactive epitopes present in allergenic proteins in the Cupin, Tropomyosin, Prolamin, Lipid transfer protein, EF hand, or Bet v 1 protein families. In some embodiments, the methods further include identifying specific antibodies that bind to one or more of the cross-reactive B-cell epitopes provided in Tables 19, 21, and 23, and/or the cross-reactive WIC-binding T-cell epitopes provided in Tables 13-18, 20, and 22.

[0339] In an aspect, the present disclosure provides methods for preparing pharmaceutically acceptable compositions comprising a specific antibody that recognizes and specifically binds one or more epitopes present in a cross-reactive allergenic protein, comprising: (a) identifying a specific antibody that binds to B-cell epitope peptides (or polypeptides or proteins comprising such B-cell epitope peptides) by the methods of the present disclosure, (b) preparing the antibody recombinantly or by chemical synthesis, and (c) creating an immunotherapeutic composition that includes the specific antibody in a pharmaceutically acceptable carrier.

[0340] In some embodiments, provided herein are methods for preparation of pharmaceutically acceptable compositions comprising two or more specific antibodies that recognize two or more cross-reactive allergenic protein or epitopes thereof, comprising: (a) identifying a specific antibody that binds to B-cell epitope peptides (or polypeptides or proteins comprising such B-cell epitope peptides) by the methods of the present disclosure; (b) preparing the two or more specific antibodies recombinantly or by chemical synthesis; and (c) creating a multiple allergen immunotherapeutic composition that includes the two or more specific antibodies in a pharmaceutically acceptable carrier. In some embodiments, each of the two or more antibodies bind different cross-reactive allergenic proteins. In other embodiments, the two or more antibodies bind the same cross-reactive allergenic proteins. In some embodiments, the two or more antibodies bind the same cross-reactive allergenic proteins at different epitopes.

[0341] In some embodiments, methods for preparation of antibodies that recognize and bind to B-cell cell epitopes include (a) correlating one or more specific allergenic proteins with other allergenic proteins in the same protein family to identify cross-reactive specific B cell epitope peptides; (b) identifying the specific IgE or IgG antibodies that bind to the identified cross-reactive B cell epitope peptides; and (c) preparing the one or more specific IgE or IgG antibodies recombinantly or by chemical synthesis. In some embodiments, correlation comprises: (a) mapping each identified allergenic protein in a food to its protein family or superfamily (e.g., based on protein domains), (b) determining and mapping homology of each of the identified allergenic protein to the full-length additional allergenic proteins within the protein family in order to identify cross-reactive allergenic proteins within the protein family, and (c) determining and mapping the identified T-cell and/or B-cell epitopes on cross-reactive allergenic proteins and the identified allergenic proteins in each protein family. In some embodiments, the correlation further comprises: generating a map of the pairwise identity and similarity between the specific allergenic protein and the other allergenic proteins in the same patent family to identify cross-reactive proteins.

[0342] In some embodiments, provided herein are the methods for preparation of an immunotherapeutic composition that is capable of treating an allergic disease to one or more cross-reactive allergenic proteins that are not present in the multiple oral immunotherapeutic composition, comprising: (a) correlating one or more specific allergenic proteins with other allergenic proteins in the same protein family to identify cross-reactive specific B cell epitope peptides; (b) identifying the specific IgE or IgG antibodies that bind to the identified cross-reactive B cell epitope peptides; (c) preparing the one or more specific IgE or IgG antibodies recombinantly or by chemical synthesis; (d) creating an immunotherapeutic compositions by combining the one or more specific IgE or IgG antibodies in a pharmaceutically acceptable carrier. One of skill in the art will appreciate that the immunotherapeutic compositions prepared by this embodiment of the method includes the one or more specific antibodies that are capable of binding cross-reactive B-cell epitopes present in the one or more specific allergenic proteins as well as in other allergenic proteins, and thus the immunotherapeutic composition comprising one or more specific antibodies directed to one or more specific allergenic protein is also capable of treating a subject for an allergic disease directed to the other allergenic proteins that can be recognized and bound by the one or more specific antibodies present in the immunotherapeutic composition. In some embodiments, the immunotherapeutic composition prepared by this method is a single allergen immunotherapeutic composition. In some embodiments, the immunotherapeutic composition prepared by this method is a multiple allergen immunotherapeutic composition. In at least one embodiment, the multiple allergen immunotherapeutic composition is a multiple allergen oral immunotherapeutic composition. In some embodiments, the one or more specific allergenic proteins is selected from the group of identified allergenic proteins set forth in Table 2.

[0343] In some embodiments, provided herein are methods for preparing a multiple allergen oral immunotherapy composition that is capable of treating an allergy to one or more cross-reactive allergenic proteins that are not present in the multiple allergen oral immunotherapy, comprising: (a) mapping one or more identified allergenic proteins present in the multiple allergen oral immunotherapy to full length homology of other allergenic proteins within a protein family; (b) identifying cross-reactive allergenic proteins with the identified allergenic proteins by pairwise identity and similarity between the sequences and/or (c) correlating one or more identified allergenic proteins with other allergenic proteins in the same protein domain family; and (d) selecting two or more identified allergenic proteins as a component in the multiple allergen oral immunotherapy if there is a greater than 70% homology (identity and similarity) with two or more identified cross-reactive allergenic proteins or if each of the two or more cross-reactive allergenic proteins has an A-RISC cross-reactivity score of ≥0.5 with respect to at least one of the one or more identified allergenic proteins. Mapping generally comprises i) providing a dataset of full-length sequences of identified allergenic proteins; ii) inputting the dataset into a computer readable medium; iii) searching the dataset of sequences using an alignment algorithm selected from the group consisting of GAP, BESTFIT, FASTA, TFASTA, BLAST, BLASTP, TBLASTN, FASTDB, ALIGN, CLUSTALW, and CLUSTAL-Omega, including any version thereof.

[0344] In some embodiments, pharmaceutically acceptable compositions further include a pharmaceutically acceptable excipient.

[0345] Techniques for formulating and administration can also be found in Remington's Pharmaceutical Sciences, Mack Publishing Co., Easton, Pa, latest edition. Cross-reactive allergenic proteins and cross-reactive epitopes may be prepared as described above and in Examples below using chemical and recombinant technology. General methods for preparation of compositions comprising cross-reactive allergenic proteins, polynucleotides encoding cross-reactive allergenic proteins, peptides comprising cross-reactive epitopes, and/or antibodies that recognize and bind them are known in the art.

[0346] Pharmaceutically acceptable compositions may be single allergen immunotherapeutic compositions (for example, in that a composition includes a single allergenic protein or epitopes from a single allergenic protein, wherein such epitopes may be present only on the single allergenic protein or may be cross-reactive with other cross-reactive allergenic proteins) or multiple allergen immunotherapeutic compositions. Multiple allergen immunotherapeutic compositions of the present disclosure may include two or more allergenic proteins, one or more epitopes from two or more allergenic proteins, or two or more antibodies each binding to a specific allergenic protein or an antibody that binds to two or more allergenic proteins. One of skill in the art will appreciate that various combination are possible for the preparation of multiple allergen immunotherapeutic compositions of the present disclosure. Pharmaceutically acceptable compositions may be formulated for administration by any suitable route of administration, for example, orally, parenterally, nasally or topically. Accordingly, provided herein in some embodiments are multiple allergen oral immunotherapeutic compositions, multiple allergen parenteral immunotherapeutic compositions, multiple allergen nasal immunotherapeutic compositions, and multiple allergen topical immunotherapeutic compositions.

[0347] When compositions of the present disclosure contain two or more active ingredients (e.g., cross-reactive allergenic proteins, cross-reactive epitopes, antibodies, etc.), each active ingredient, may be present in equal amounts or they may be present in different amounts on a w/w basis of the final composition. In some embodiments, compositions may comprise two or more active ingredients wherein each of two or more active ingredients may be held at a concentration insufficient to elicit an immune response by itself, but when combined in a multiple allergen immunotherapeutic composition, the sum of the two or more active ingredient is sufficient to elicit an immune response. In some embodiments, where multiple allergen compositions comprise two or more whole (complete) food sources (e.g., from Table 8), each may be present in the composition in equal amounts or in differing amounts. In some embodiments, each of the two or more whole food sources may be held at a concentration insufficient to elicit an immune response by itself, but when combined in a multiple allergen immunotherapeutic composition, the sum of the two or more individual food sources is sufficient to elicit an immune response. One of skill in the art will appreciate that presence of a second or third (or more) cross-reactive allergenic protein or cross-reactive epitope peptide may, in certain embodiments, boost the ability of the first (or as may be the case, primary) allergenic protein or epitope peptide in inducing an immune response.

[0348] In some embodiments, compositions comprise two or more cross-reactive T-cell epitopes, wherein cross-reactive T-cell epitopes from a first cross-reactive allergenic protein (e.g., an identified allergenic protein of Table 2) synergize with cross-reactive T-cell epitopes from an other (second or third or fourth and so on) cross-reactive allergenic protein to boost the effect of the cross-reactive T-cell epitopes from the first cross-reactive allergenic protein (and vice versa). In some embodiments, compositions comprise two or more polypeptides or cross-reactive allergenic proteins comprising one or more cross-reactive epitopes.

[0349] Pharmaceutically acceptable excipients are known in the art and are compatible with other ingredients in the formulation and are not toxic to the subjects to whom they are administered. Such pharmaceutically acceptable excipients include pharmaceutically acceptable carriers which can be liquid carriers, finely divided solid carriers, or both. Suitable pharmaceutically acceptable carriers include, but are not limited to, sterile water, saline, glucose, dextrose, alcohols, buffered solutions, and other organic and inorganic solvents. Pharmaceutically acceptable excipients include agents such as diluents, stabilizers (e.g., sugars and amino acids), preservatives (such as ethyl-p-hydroxybenzoate), bulking agents (such as glycine, mannitol, etc.), suspending agents (such as methyl cellulose, tragacanth, sodium alginate) wetting agents (such as lecithin, polyoxyethylene stearate, polyoxyehtylene sorbitan mono-oleate, etc.), emulsifying agents such as surfactants (such as non-ionic surfactants, polymeric surfactants, polyoxyethylene sorbitan ester surfactants, polysorbates such as Polysorbate 80, Tween 20, poloxamers), pH buffering agents, additives that enhance viscosity, granulating and disintegrating agents (e.g., starch, alginic acids), binding agents (e.g., starch, gelatin, HPMC, CMC, acacia etc.), lubricating agents (e.g., magnesium stearate, stearic acid, talc, etc.), antibacterial and antifungal agents (such as phenol, sorbic acid, chlorobutanol, etc.), odor masking agents, flavoring agents, coloring agents, and any other excipient conventionally added to pharmaceutical formulations, and any combinations thereof. In some embodiments, excipients are plant derived. In other embodiments, excipients are not human or animal derived.

[0350] Non-limiting examples of surfactants include TWEEN20 (polysorbate 20), TWEEN40 (polysorbate 40), TWEEN60 (polysorbate 60), TWEEN80 (polysorbate 80), TRITON X-100, IGEPAL CA-630, Nonidet P-40, PLURONIC F-68, PLURONIC F-88, and PLURONIC F-127 (poloxamers), and Brij 35 (polyoxyethylene alkyl ether) available from various commercial manufacturers.

[0351] In some cases, a pharmaceutically acceptable composition further comprises a physiologically acceptable adjuvant. An adjuvant typically provides for increased immunogenicity. An adjuvant can be one that provides for slow release of the active ingredients (example, a liposome), or it can be an adjuvant that is immunogenic in its own right and which may, for example, thereby function synergistically with a cross-reactive protein or peptide. For example, an adjuvant can be a known adjuvant or other substance that is capable of promoting the uptake of the active ingredients, recruiting immune cells to the site of administration, or facilitating the immune activation of responding lymphoid cells. Adjuvants include, but are not limited to, immunomodulatory molecules (e.g., cytokines such as hIL-12), CpG motifs (synthetic oligonucleotides containing immunomodulatory CpG motifs), virosomes, oil and water emulsions, mineral salts (e.g., aluminum hydroxide, calcium or aluminum phosphate gels), glucan, dextran sulfate, iron oxide, sodium alginate, bacto-adjuvant, synthetic polymers such as poly amino acids and co-polymers of amino acids, saponin, ISCOMS, paraffin oil, muramyl dipeptide, Immundaptin (C3d tandem array), and inert particles such as gold particles. For example, polysorbate 80 may be used in the preparation of pharmaceutically acceptable immunotherapeutic compositions comprising vaccines.

[0352] In some embodiments, compositions of the present disclosure are provided as lyophilized forms and may be resolubilized at the time of administration. Such lyophilized forms are stable for handling, transportation, and long-term storage. Lyophilized forms may include excipients such as bulking agents, stabilization agents, and surfactants to maintain the stability of the cross-reactive allergenic proteins, epitope peptides thereof, vaccines, and/or antibodies of the present disclosure. A lyophilized form may be reconstituted at the time of use or it may be included neat or with additional excipients described herein in a solid dosage form such as tablet, caplet, or capsule.

[0353] In some embodiments, pharmaceutically acceptable compositions may comprise a pharmaceutically acceptable carrier. Such compositions may be formulated as liquid formulations. In some embodiments, liquid formulations may be provided as hydroalcoholic compositions and/or aqueous compositions.

[0354] In some embodiments, active ingredients may be encapsulated, adsorbed to or associated with particulate carriers, such as lipid particles, polymethyl methacrylate polymer particles, PLG particles derived from poly(lactides) and poly(lactide-co-glycolides) (See Jeffry et al. (1993) Pharm. Res. 10:362-368). Other particulate systems and polymers may also be used, e.g., polymers such as polylysine, polyarginine. Polyornithine spermine, spermidine, as well as conjugates thereof.

[0355] In some embodiments, pharmaceutically acceptable compositions may be formulated as lipid microparticles or lipid nanoparticles, etc. Such microparticles and/or nanoparticles may comprise lipid vesicles, lipid microspheres, nanosphere, etc. In various embodiments, lipid microparticles and lipid nanoparticles may be any of solid lipid nanoparticles (SLN, made up of solid lipids with a photon correlation spectroscopy mean diameter of approximately between 50 and 1000 nm and SLM have an equivalent composition to SLN, but with a larger particle size (>1000 nm)), nanostructured lipid carriers, lipid-drug conjugate nanoparticles, Lipid nanocapsules. Methods for preparation of such lipid microparticles and lipid nanoparticles are known in the art and further described in Battaglia and Ugazio available on the world wide web at doi.org/10.1155/2019/2834941 and U.S. Pat. No. 6,287,591B1.

[0356] Lipid nano- and microparticles can be orally administered in the form of aqueous dispersions or, alternatively, after transformation into a solid dosage form, such as tablets, pellets, capsules, or powders in cachets. Aqueous particulate dispersions can be used as a granulation fluid for the production of tablets. Alternatively, they can be transformed into a powder (e.g., by spray-drying or freeze-drying) and added to a tableting powder mixture or used to fill hard gelatin capsules.

[0357] Lipid microparticles and lipid nanoparticles can be used, for example, for parenteral applications: from intra-articular to intramuscular, subcutaneous, and intravenous administration. Because of their small size, lipid nanoparticles can be injected intravenously and used to target drugs to specific organs. In some embodiments, “stealth” lipid nanoparticles are prepared by coating their surface with polyethylene glycol (PEG) to avoid clearance from circulation by liver and spleen.

[0358] Lipid microparticles and nanoparticles of the present disclosure are also useful for topical administration. Cutaneous drug delivery of lipid particles may, for example, provide the ability to protect chemically labile ingredients against chemical decomposition, the ability to modulate drug release, and the ability to form adhesive lipid films on the skin, providing a possible occlusive effect.

[0359] In some embodiments, pharmaceutically acceptable compositions are emulsions, such as oil-in-water emulsions, water-in-oil emulsions, water-in-oil-in water emulsions, oil-in-water-in-oil emulsion, etc. Emulsions may, for example, include at least three core ingredients: an oil component; an aqueous component; and a surfactant component. In general, oil-in-water emulsions are formed by combining at least one oil (e.g., an oil component), an aqueous component such as water, and at least one surfactant which has been subjected to the methods described herein. Although spontaneous emulsification is possible, mixing will normally involve mechanical aid, such as the use of a homogenizer and/or a microfluidizer. In an embodiment, an emulsification process mixes components first by using a homogenizer and then by using a microfluidizer. Where a component includes more than one compound (e.g., two different oils in the oil component, two different surfactants in the surfactant component, etc.), these may be combined in various orders prior to emulsification, e.g., a first surfactant and an oil may be pre-mixed, to be combined with a mixture of a second surfactant and an aqueous component.

[0360] Provided herein in one embodiment are methods for preparation of pharmaceutically acceptable compositions comprising the active ingredients of the present disclosure including: (a) providing a surfactant, such as polysorbate 80, and (b) combining the purified surfactant (e.g., polysorbate 80) with an oil component to provide an emulsion. In addition to the purified surfactant and the oil component, the emulsion will include an aqueous component (and, as described in more detail below, possibly further components as well). Aqueous material may be added as a third component in step (b), or may be combined with the surfactant and/or the oil prior to step (b). Thus, the surfactant (e.g., polysorbate 80) which is provided in step can be an aqueous solution of the surfactant (e.g., polysorbate 80), but may also be non-aqueous surfactant (e.g., a surfactant which has not been diluted with water (or any other aqueous material) prior to being filtered). The oil-in-water emulsion thus obtained is then combined with a two or more cross-reactive allergenic proteins to create a pharmaceutically acceptable composition. Although it is possible to administer oil in water emulsion adjuvants on their own to subjects (e.g., to provide an adjuvant effect for an antigen that has been separately administered to a subject), it is more usual to admix the adjuvant with an antigen prior to administration, to form an immunogenic composition, e.g., a vaccine. Mixing of emulsion and antigen may take place extemporaneously, at the time of use, or can take place during vaccine manufacture, prior to filling. The methods of the present disclosure can be applied in both situations.

[0361] Compositions can be used when preparing mixed vaccines or when preparing kits including active ingredients (antigens or antibodies) and adjuvant ready for mixing. Where mixing takes place during manufacture then the volumes of bulk active ingredients and emulsion that are mixed will typically be greater than 1 liter, e.g., >5 liters, >10 liters, >20 liters, >50 liters, >100 liters, >250 liters, etc. Where mixing takes place at the point of use then the volumes that are mixed will typically be smaller than 1 milliliter, e.g., <0.6 ml, <0.5 ml, <0.4 ml, <0.3 ml, <0.2 ml, etc. In both cases it is usual for substantially equal volumes of emulsion and antigen solution to be mixed substantially 1:1 (e.g., between 1.1:1 and 1:1.1, preferably between 1.05:1 and 1:1.05, and more preferably between 1.025:1 and 1:1.025). In some embodiments, however, an excess of emulsion or an excess of antigen may be used. Where an excess volume of one component is used, the excess will generally be at least 1.5:1, e.g., >2:1, >2.5:1, >3:1, >4:1, >5:1, etc.

[0362] In some embodiments, 3 cross-reactive allergenic proteins are combined as active ingredients with emulsions of the present disclosure to create a multiple allergen immunotherapeutic composition that, for example, is suitable for oral, parenteral, nasal, and/or topical administration.

[0363] In some embodiments, an oil-in-water emulsion obtained is combined with one or more epitope peptides (such as cross-reactive T-cell epitope peptides, B-cell epitope peptides, and/or MHC-binding epitope peptides) to create a pharmaceutically acceptable composition. In some embodiments, an oil-in-water emulsion is combined with 4 or more cross-reactive T-cell epitope peptides, B-cell epitope peptides, or MHC-binding epitope peptides, or a combination thereof, of a single cross-reactive allergenic protein to create an allergen immunotherapeutic composition or vaccine. In some embodiments, an oil-in-water emulsion is combined with 4 or more cross-reactive T-cell epitope peptides, B-cell epitope peptides, or MHC-binding epitope peptides, or a combination thereof, selected from the group set forth in Tables 13-23 to create an allergen immunotherapeutic composition or vaccine.

[0364] In some embodiments, an oil-in-water emulsion is combined with one or more antibodies that recognize and bind epitope peptides (cross-reactive or non-cross-reactive) of allergenic proteins to create a pharmaceutically acceptable composition. In some embodiments, an oil-in-water emulsion is combined with a single antibody that recognizes and binds to a cross-reactive B-cell epitope peptide and/or MHC-binding epitope peptide set forth in Tables 13-23.

[0365] An aqueous component may comprise an aqueous solution which may be plain water (e.g., w.f.i.) or can include further components, e.g., solute(s). For instance, it may include salts to form a suitable buffer, e.g., citrate or phosphate salts, such as sodium salts. Typical buffers include, but are not limited to: a phosphate buffer, a Tris buffer, a borate buffer, a succinate buffer, a histidine buffer, and a citrate buffer. Buffers will typically be included in the 5-50 mM range, depending on the particular buffer being used.

[0366] In some embodiments, a total amount of lipids (oil(s)) (% by volume) in a final emulsion is between about 1-30%, e.g., about 1%, about 2%, about 3%, about 4%, about 5%, about 6%, about 7%, about 8%, about 9%, about 10%, about 11%, about 12%, about 13%, about 14%, about 15%, about 16%, about 17%, about 18%, about 19%, about 20%, about 21%, about 22%, about 23%, about 24%, about 25%, about 26%, about 27%, about 28%, about 29% about 30%. In some embodiments, a total amount of oil(s) (% by volume) in a final emulsion is between about 1-20%, between about 5-15%, between about 8-12%, or about 10%.

[0367] In some embodiments, amounts of surfactants range from about 0.01% to about 2%, about 0.5% to about 2% or about 1% on a w/w/basis of a final emulsion. In some embodiments, a surfactant is polysorbate 80, commercially available from many manufacturers at a pharmaceutical grade (e.g., the ultra-pure “Polysorbate (HX2)” product from NOF Corporation). Polysorbate 80 may be present in a final composition in amounts ranging from 0.01% to about 2%. In some embodiments, multiple surfactants may be used. The HLB value of the surfactants may be in the range of 1-10 (e.g., SPAN 85, with an HLB of 1.8). Surfactants which can be used in addition to polysorbate 80 include, but are not limited to: the polyoxyethylene sorbitan esters surfactants (commonly referred to as the Tweens), such as polysorbate 20; copolymers of ethylene oxide (EO), propylene oxide (PO), and/or butylene oxide (BO), sold under the DOWFAX™ tradename, such as linear EO/PO block copolymers; octoxynols, which can vary in the number of repeating ethoxy (oxy-1,2-ethanediyl) groups, with octoxynol-(TRITON™ X-100, or t-octylphenoxypolyethoxyethanol) being of particular interest; (octylphenoxy)polyethoxyethanol (IGEPAL CA-630/NP-40); phospholipids such as phosphatidylcholine (lecithin); polyoxyethylene fatty ethers derived from lauryl, cetyl, stearyl and oleyl alcohols (known as Brij surfactants), such as triethyleneglycol monolauryl ether (Brij 30); polyoxyethylene-9-lauryl ether; and sorbitan esters (commonly known as the SPANs), such as sorbitan trioleate (SPAN® 85) and sorbitan monolaurate.

[0368] The term lipid as used herein includes, for example, triglycerides (e.g., tristearin), partial glycerides, fatty acids (e.g., stearic acid), steroids (e.g., cholesterol), and waxes (e.g., cetyl palmitate). Lipids in an emulsion's oil components will typically be biodegradable, metabolizable, and biocompatible. An oil component in an emulsion may include a single oil, or may comprise a combination of oils, e.g., comprising a fatty acid such as stearic acid and at least one further oil for example a triglyceride such as tristearin. Other lipids will be apparent to one of skill in the art.

[0369] In some embodiments, excipients do not include any human or animal products.

[0370] Compositions disclosed herein may comprise comprise a suitable concentration of each protein, polypeptide, peptide, polynucleotide, or binding agent (e.g., antibody) to be effective. Exemplary concentrations of each cross-reactive allergenic protein or peptide include those in the range of about 0.01 to 500 nmol/mL. In some embodiments, a range will be about 0.1 to 300 nmol/mL, about 1 to 200 nmol/mL, about 10 to 150 nmol/mL or about 25 to 100 nmol/mL. Where compositions are multiple allergen immunotherapeutic composition, each cross-reactive allergenic protein in the composition (or cross-reactive peptide) may be present in equal amounts or differing amounts. Where more than two active ingredients are present, two or more may be in the same amount while the remaining active ingredients may be in differing amounts.

[0371] In some embodiments, a concentration of an antibody in a composition will range from 0.01 μg/mL to 500 mg/mL. In some embodiments, a concentration of an antibody will range from 1 μg/mL to 400 mg/mL, from about 10 μg/mL to about 300 mg/mL, from about 10 mg/mL to about 300 mg/mL, or from about 1 mg/mL to about 500 mg/mL. Active ingredients in compositions or formulations may, for example, have a purity of greater than 95%, 96%, 97%, 98%, or 99%.

[0372] In some embodiments, multiple allergen immunotherapeutic compositions comprising two or more whole (complete) food sources selected from Table 8 comprise each food source in equal proportions. In some exemplary compositions, the two or more whole food sources are provided as a whole food flour or powder. In some embodiments, the composition comprises proteins extracted from each whole food source. In some embodiments, a multiple allergen composition comprising two or more whole food source includes 0.1% to 50% total protein and a pharmaceutically acceptable excipient. In some embodiments, two or more whole food sources are present in ratios ranging about 1:1. Compositions comprising two or more whole food sources may be formulated as a tablet, caplet or a capsule. In some embodiments, the compositions may be in liquid dosage forms. Dosage forms can be, for example, from 0.1 mg to 2 gm per dosage unit. In some embodiments, each dosage unit comprises about 0.1 mg, 0.5 mg, 1 mg, 5 mg, 10 mg, 25 mg, 50 mg, 100 mg, 200 mg, 500 mg, 1000 mg, 1500 mg or 2000 mg per dosage unit. Pharmaceutically acceptable excipients are known in the art and described above. In some embodiments, excipients do not include any human or animal products.

[0373] In some embodiments, provided herein are methods for preparation of multiple allergen compositions comprising two or more whole food sources (for example, food sources provided in Table 8). In some embodiments, multiple allergen compositions are formulated as orally administered solid dosage forms, such as tablets, caplets and/or capsules. In some embodiments, a fill includes a binding agent to enhance flowability such as those provided above and an odor masking agent and/or a flavoring agent. Equal amounts of the food sources are included in some embodiments. Excipients suitable for inclusion in a multiple allergen oral composition can be any of the excipients known in the art.

[0374] In some embodiments, pharmaceutically acceptable compositions of the present disclosure, when administered to a subject, biological sample, or cell, are capable of eliciting an immune response (such as IgE and/or IgG production, T-cell activation, basophil activation, etc.) in the subject, biological sample, or cell. Pharmaceutically acceptable compositions of the present disclosure comprising, for example, DNA, peptides, cross-reactive allergenic proteins, B-cell epitope peptides, MHC-II-binding epitope peptides, and/or T-cell epitope peptides, may, for example, be useful as vaccine immunotherapeutic compositions for prophylactic or therapeutic treatment of one or more food allergies or food-intolerances or symptoms thereof or other epitope-sensitive conditions. Pharmaceutically acceptable compositions of the present disclosure comprising, for example, binding partners of DNA, peptides, cross-reactive allergenic proteins, B-cell epitope peptides, MHC-II-binding epitope peptides, and/or T-cell epitope peptides, may, for example, be useful as immunotherapeutic compositions for prophylactic or therapeutic treatment of one or more food allergies or food-intolerances or symptoms thereof or other epitope-sensitive conditions.

[0375] Compositions of the present disclosure (for example, comprising antibodies or other binding partners) may also, for example, be useful in assays for detection of specific allergenic antigens (food antigens and/or cross-reactive non-food antigens) and for identification of candidate subjects that would benefit from administration of a pharmaceutically acceptable composition of the present disclosure. Compositions of the present disclosure (for example, comprising allergenic proteins or peptides comprising epitopes of cross-reactive allergenic proteins) may also, for example, be useful in assays for detection of antibodies in a subject, a biological sample, or a cell and/or in assays for testing the potency of pharmaceutically acceptable compositions comprising cross-reactive proteins and/or cross-reactive peptides.

[0376] In some embodiments, compositions (e.g., oral, parenteral, nasal, topical etc.) disclosed herein, when administered to a subject, are capable of treating an allergic disease due to a cross-reactive allergenic protein and/or an identified allergenic protein that is not present in the composition.

### XI. DETECTION; DIAGNOSTICS

[0377] Cross-reactive allergenic proteins and/or cross-reactive epitopes identified using methods provided herein may, for example, induce immune responses, for example, mediated by cross-reactive IgE, IgG, T-cells (such as CD4+ cells, T-regs), and/or or other cells. Such cross-reactive allergenic proteins or cross-reactive epitope peptides capable of inducing an immune response may also be referred to as “immunologically cross-reactive allergenic proteins” or “immunologically cross-reactive allergenic peptides.” Antibodies that are cross-reactive with immunologically cross-reactive allergenic proteins or cross-reactive epitope peptides can be readily detected using methods provided herein. In one aspect, the present disclosure provides methods for detection of such cross-reactive antibodies, for example, IgE and/or IgG antibodies (such as IgG1, IgG2, IgG3, and/or IgG4). Contemplated methods may, for example, be useful for confirming the presence of a suspected allergy, for example, based on a subject's clinical history. Contemplated methods may also, for example, be useful for monitoring the efficacy of an allergy therapy such as with a multiple allergen oral immunotherapy. Contemplated methods may also, for example, be useful for determining the extent or severity of an allergy, or the potential (or risk) for developing a cross-reactive sensitization or an allergy mediated by one or more cross-reactive allergenic proteins.

[0378] The disclosure provides, for example, methods for the detection of an immune response (e.g., by the detection of the presence of cross-reactive antibodies such as IgE and IgG) in a subject, a biological sample, or a cell. The disclosure also provides, for example, methods for the multiplexed detection of an immune response (e.g., by the detection of the presence of cross-reactive antibodies such as IgE and IgG, and/or by the detection of T-cell or basophil activation or response) in a subject, a biological sample, or a cell.

[0379] In some embodiments, cross-reactive proteins or epitope peptides of the present disclosure are coupled to a solid support or substrate (for example, via a linker) to form one or more protein-solid support complexes and/or epitope peptide-solid support complexes.

[0380] In some embodiments, cross-reactive allergenic proteins (including identified allergenic proteins) or cross-reactive epitope peptides of the present disclosure are immobilized to a solid support substrate. In some embodiments, 2 or more, 3 or more, 4 or more, 5 or more, 6 or more, 7 or more, 8 or more, 25 or more, 50 or more, 100 or more, 1000 or more, or at least 5000 distinct allergenic proteins or peptides are immobilized to a solid support substrate. In some embodiments, at least 6 distinct identified allergenic proteins (such as those in Table 2) are immobilized to a solid support or substrate.

[0381] In some embodiments, 1 or more, 2 or more, 3 or more, 4 or more, 5 or more, 6 or more, 7 or more, 8 or more, 25 or more, or 50 or more, 100 or more, or 1000 or more distinct cross-reactive allergenic proteins (for examples, proteins in protein families listed in Tables 3-4 or proteins listed in Tables 4-7 and 10-12). In some embodiments, one or more cross-reactive allergenic proteins are selected from: Ber_e_2, Car_i_2, Fag_e_1, Fag_e_13S, Fag_t_13S_globulin, Jug_n_4, Lup_a_vicilin, Lup_an_1, Pin_k_2, Pis_s_1, Pis_s_2, Pis_v_2, Ses_i_3, Ses_i_6, Ses_i_7, Sin_a_2, Vig_r_2, Car_i_4, Gly_m_5, Gly_m_6, Jug_r_4, or Len_c_1, or Pru_du_6.

[0382] In some embodiments, cross-reactive epitope peptides of the present disclosure are immobilized or coupled to a solid support or substrate. In some embodiments, cross-reactive MHC-II binding epitope peptides derived from identified allergenic proteins or cross-reactive allergenic proteins are immobilized or coupled to a solid support or substrate. Such cross-reactive epitope peptides (for example, peptides comprising MHC-II-binding T-cell epitope peptides or B-cell epitope peptides) may, for example, be derived from at least 2 distinct allergenic proteins, at least 3 distinct allergenic proteins, at least 4 distinct allergenic proteins, at least 5 distinct allergenic proteins, at least 6 distinct allergenic proteins, or more, for example, at least 50 distinct allergenic proteins, at least 100 distinct allergenic proteins, at least 500 distinct allergenic proteins, at least 1000 distinct allergenic proteins, or at least 5000 distinct allergenic proteins, etc. Non-limiting examples of cross-reactive peptides that may, for example, be immobilized on a solid support or substrate include cross-reactive epitope peptides derived from cross-reactive allergenic proteins in Tables 4-7 and 10-12. In some embodiments, cross-reactive MHC-II-binding T-cell peptides are selected from the group of cross-reactive MHC-II binding T-cell peptides provided in Tables 13-18, 20, and 22. In some embodiments, the -reactive MHC-II binding T-cell peptides are derived from one or more of: Ber_e_2, Car_i_2, Fag_e_1, Fag_e_13S, Fag_t_13S_globulin, Jug_n_4, Lup_a_vicilin, Lup_an_1, Pin_k_2, Pis_s_1, Pis_s_2, Pis_v_2, Ses_i_3, Ses_i_6, Ses_i_7, Sin_a_2, Vig_r_2, Car_i_4, Gly_m_5, Gly_m_6, Jug_r_4, or Len_c_1, or Pru_du_6. In some embodiments, cross-reactive MHC-II-binding T-cell peptides are selected from the group of cross-reactive B-cell epitope peptides and/or MHC-binding epitope peptides set forth in Tables 13-23.

[0383] Provided herein are methods for detecting the presence of specific food antigens and cross-reactive non-food antigens in a subject, a biological sample, or a cell. Methods include, for example, providing one or more specific antibodies (e.g., IgG, IgE, IgM, IgA, IgD, etc.) to a cross-reactive B-cell epitope peptide and/or MHC-binding epitope peptide, contacting a biological sample that is suspected to (may) have an allergenic protein under conditions sufficient to permit binding of the antibodies, and detecting binding of the antibodies, to identify the specific food antigen and/or specific cross-reactive non-food antigen. A food antigen can be any food antigen. Exemplary food antigens to which antibodies may, for example, bind include those provided in the present disclosure, including but not limited to, food antigens from the food sources listed in Table 1 and Table 8. Exemplary cross-reactive non-food antigens to which antibodies may, for example, bind include those present in the non-food sources provided in Table 8. In some embodiments, antibodies bind to exemplary Cupin cross-reactive epitope peptides set forth in Tables 13-19. In some embodiments, antibodies bind to exemplary Tropomyosin and Bet v 1 cross-reactive epitope peptides set forth in Tables 20-23.

### Substrates/Supports

[0384] Identified allergenic proteins, cross-reactive allergenic proteins (including immunologically cross-reactive proteins), cross-reactive epitope peptides, and/or antibodies of the present disclosure can be immobilized onto a solid support or substrate. Substrates include any suitable rigid or semi-rigid substrate, such as membranes, filters, chips (such a microchips), slides (such as microscope slides), wafers fibers, magnetic or non-magnetic beads, gels, tubing, plates (such as microtiter plates), polymers, microparticles, and capillaries. Substrates may have any of a variety of surface forms, such as wells, trenches, pins, channels, and pores, to which proteins or peptides bind. In some embodiments, substrates are optically transparent. In some embodiments, a substrate is a poly-L-lysine coated microscope slide. In some embodiments, a substrate is a multi-well microtiter plate. In some embodiments, a substrate is a bead.

### Microarrays

[0385] In some embodiments, identified allergenic proteins and/or one or more immunologically cross-reactive allergenic proteins are coupled to a solid substrate that is an array, such as a microarray. In some embodiments, antibodies capable of detecting particular or specific food antigens or cross-reactive non-food antigens are couple or immobilized on to a solid support or substrate, such as those described above. In some embodiments, antibodies capable of detecting particular or specific food antigens or cross-reactive non-food antigens are couple or immobilized on a solid support or substrate in an array such as a microarray. Such microarray technologies may, for example, allow for the evaluation of large numbers of biological samples simultaneously in a high-throughput manner. Microarrays can be fabricated using a variety of technologies, including printing with fine-pointed pins, photolithography using pre-made masks, photolithography using dynamic micromirror devices, ink-jet printing, microcontact printing, or electrochemistry on microelectrode arrays. In standard microarrays, probe molecules are attached via surface engineering to a solid surface of supporting materials, which include glass, silicon, plastic, hydrogels, agaroses, nitrocellulose and nylon.

[0386] Several techniques are well-known in the art for attaching polynucleotides to a solid substrate such as a glass slide. One method is to incorporate modified bases or analogs that contain a moiety that is capable of attachment to a solid substrate, such as an amine group, a derivative of an amine group, or another group with a positive charge, into amplified polynucleotides. An amplified product is then contacted with a solid substrate, such as a glass slide, which may be coated with an aldehyde or another reactive group which can form a covalent link with the reactive group that is on the amplified product and become covalently attached to the glass slide. Microarrays comprising amplified products can be fabricated using a Biodot (BioDot, Inc., Irvine, Calif) spotting apparatus and aldehyde-coated glass slides (CEL Associates, Houston, Tex.). Amplification products can be spotted onto aldehyde-coated slides, and processed according to published procedures (Schena et al. (1995) Proc. Natl. Acad. Sci. U.S.A. 93:10614-10619). Arrays can also be printed by robotics onto glass, nylon (Ramsay, G., Nature Biotechnol. (1998), 16:40-44), polypropylene (Matson, et al. (1995) Anal Biochem. 224(1):110-6), and silicone slides (Marshall and Hodgson, Nature Biotechnol. (1998) 16:27-31). Other approaches to array assembly include fine micropipetting within electric fields (Marshall, and Hodgson, Nature Biotechnol. (1998) 16:27-31), and spotting polynucleotides directly onto positively coated plates. Methods such as those using amino propyl silicon surface chemistry are also known in the art, as disclosed on the world wide web at cmgm.stanford.edu/pbrown/.

[0387] Commercial antibody array printing services are available for the preparation of custom antibody arrays, for example, membrane-based arrays using a chemiluminescent imager (CCD camera or x-ray film/dark room) as a detection system, glass slide-based arrays using laser microarray scanner for detection, and bead array using a flow cytometer for detection (RayBiotech, USA; Full Moon Biosystems, USA; and Kinexus, Canada).

[0388] Assays of the present disclosure may be implemented in a multiplex format. Multiplex methods are provided employing 2, 3, 4, 5, 6, 8, 10, 15, 20, 25, 50, 100, 200, 500, 1000 or more different cross-reactive allergenic proteins (or peptides thereof) which can be used simultaneously to assay for cross-reactive antibodies, for example, IgE or IgG, for example, IgG4 antibodies. Multiplex methods are also provided employing 2, 3, 4, 5, 6, 8, 10, 15, 20, 25, 50, 100, 200, 500, 1000 or more different antibodies recognizing and binding cross-reactive allergenic proteins (or epitope peptides thereof) which can be used simultaneously to assay for the presence of cross-reactive proteins (food allergens and/or cross-reactive non-food allergens). In some embodiments, six or more antibodies (e.g., IgE or IgG) are bound to a solid support or substrate, wherein the six or more antibodies bind to B-cell epitopes and/or MHC-binding epitopes in cross-reactive allergenic proteins present in any of the identified protein families set forth in Tables 3-4. In some embodiments, six or more antibodies (e.g., IgE or IgG) are bound to a solid support or substrate, wherein the six or more antibodies bind to B-cell epitopes set forth in Tables 19, 21 and 23. In some embodiments, six or more antibodies (e.g., IgE or IgG) are bound to a solid support or substrate, wherein the six or more antibodies bind to MHC-binding epitopes selected set forth in Tables 13-18, 20, and 22.

[0389] In some embodiments, four or more epitopes are bound to a solid support or substrate, wherein the four or more epitope peptides (B-cell epitope peptides, T-cell epitope peptides, and/or MHC-binding epitope peptides) are selected from the group set forth in Tables 13-23.

[0390] Where different substrates are included in a multiplex assay as part of a capture probe conjugate, the different substrates can be encoded so that they can be distinguished. Any encoding scheme can be used; for example, an encoding scheme can employ one or more different fluorophores, which can be fluorescent semiconductor nanocrystals. High density spectral coding schemes can be used.

[0391] The present disclosure provides solid support or substrates described above including particles, microparticles or beads, e.g., magnetic beads, that can be used, for example, for microarray-based assays. Particles or beads can be prepared from a variety of different polymers, including but not limited to polystyrene, cross-linked polystyrene, polyacrylic acid, polylactic acid, polyglycolic acid, poly(lactide coglycolide), polyanhydrides, poly(methyl methacrylate), poly(ethylene-co-vinyl acetate), polysiloxanes, polymeric silica, latexes, dextran polymers and epoxies. Materials have a variety of different properties with regard to swelling and porosity, which are well understood in the art. Preferably, beads are in the size range of approximately 10 nanometers to 1 millimeter, preferably 100 nanometers to 10 micrometers, and can be manipulated using normal solution techniques when suspended in a solution. The terms “particle,” “nanoparticle,” “bead,” “microbead,” “nanobead,” “sphere,” “microparticle,” and “microsphere” are used interchangeably herein, unless indicated otherwise.

[0392] Suitable chemical compositions for magnetic particles may be ferromagnetic materials and include rare earth containing materials such as, e.g., iron-cobalt, iron-platinum, samarium-cobalt, neodynium-iron-boride, and the like. Other magnetic materials, e.g., superparamagnetic materials such as iron oxides (Fe3O4) may be used as well. Preferred magnetic materials include iron-cobalt as such material is generally easier to magnetize, has a stronger magnetization (about 1.7 Tesla) and is less susceptible to corrosion.

### Detection

[0393] Antibodies in a test sample or allergen or epitope peptides in a test sample may be detected using any convenient detection method. Immunocomplexes of an IgE from a test sample (such as a biological sample) and epitope peptides of an allergenic protein, or immunocomplexes of allergenic proteins or epitope peptides from a test sample and antibodies that recognize and bind the allergenic proteins or epitope peptides may be detected using a variety of techniques. For instance, many such methods (which may be, for example, qualitative or semi-quantitative) rely on the use of antibodies. For instance, detection may entail contacting a sample with an antibody of the present disclosure and detecting binding of material in the sample to the antibody. Such assays can, e.g., be in the form of agglutination assays or immunoblots (dot blot analysis, quantitative dot blot, Western blot) of any format. To facilitate detection an antibody may be labelled with a radioactive isotope, a component of a ligand/receptor pair, a luminescent or fluorescent label, an enzyme, etc.

[0394] A sample (for example, a biological sample, for example, obtained from a subject, an allergen extract, an immunotherapy composition comprising an allergen whole food source, an allergenic protein peptide of the present disclosure) may, for example, be incubated with one or more identified allergenic proteins and/or immunologically cross-reactive allergenic proteins (for example, using a microarray) under conditions that allow immunocomplexes to form. As another example, a biological sample which may have specific food allergens or cross-reactive non-food allergens may, for example, be incubated with antibodies (for example using a microarray) under conditions that allow immunocomplexes to form. After an incubation period, the solid support may, for example, be washed to remove excess biological sample that has not bound to immobilized allergenic proteins or peptides thereof, or antibodies, and immunocomplexes may be detected, for example, using a labeling agent such as an incorporated fluorophore.

[0395] Labeling agents can be any suitable labeling agent known in the art, including radioisotopes, fluorophores, and biotin, etc. In some embodiments, the labeling agent is a fluorophore, such as fluorescein isothocyanate, rhodamine, phycoerythrin, phycocyanin, allophycocyanin, o-pthaldehyde, florescamine or fluorescence-emitting metals such as ¹⁵²Eu or other lanthanides. These metals may, for example, be attached to antibodies (or peptides and polypeptides) using metal chelators, In some embodiments, the labeling agent is chemiluminescent compound. The presence of chemiluminescence-tagged antibody or antigen peptide may, for example, be determined by detecting luminescence that arises during the course of chemical reaction. Example of bioluminescent compounds include luciferin, luciferase, and aequorin. In some embodiments, the labeling agent may be a radio label such as ¹²⁵I, ³⁵S and ¹⁴C.

[0396] Contemplated methods may use a second antibody that may, for example, be specific for epitopes characteristic of a particular human immunoglobulin type, for example, IgM, IgG1, IgG2, IgG3, IgG4, IgE and the like, which may permit identification of the isotype or isotypes of antibodies in a sample. A second antibody may be specific for an idiotype of a detection antibody (e.g., an antibody disclosed herein) or an antibody present in a biological sample.

[0397] One of skill in the art will be able to determine operative and optimal conditions for each determination by routine experimentation. Further, steps of washing stirring, shaking, filtering and the like may be added to the assays as is customary or necessary for the particular situation.

[0398] In some embodiments, a bioassay used is an enzyme-linked immunosorbent assay (ELISA), wherein an enzyme is used as a detectable label bound either to an antibody or an antigen. When exposed to its substrate, the enzyme reacts to produce a chemical moiety which can be detected, for example, by spectrophotometer, fluorometric or visual means. Enzymes useful in the context of the present disclosure of are known in the art. In some embodiments, fluorescence microscopy can be used to detected the presence of bound IgE (or IgG) etc., for example by examining a scanned image to determine the intensity of signal from a cross-reactive antibody.

[0399] In some embodiments employing particles, readout devices may not be necessary. For example, particles on microarray spots can be viewed directly with naked eyes if the spots are larger than 0.03 millimeters in diameter. Alternatively, assay results with any spot sizes, from 0.01 millimeters to 5 millimeters in diameter, can be photographed with an ordinary camera or viewed under an appropriate magnification microscope.

[0400] Binding partners of the present disclosure (e.g., specific antibodies, epitope-specific T-cells, etc.) may, for example, be useful in the detection of an immune response to one or more cross-reactive allergens in a subject, a biological sample, or a cell.

[0401] In some embodiments, antigens (cross-reactive allergenic proteins (including identified allergenic proteins and cross-reactive epitope peptides)) of the present disclosure are not immobilized on a solid support or substrate, but can be used in a solution-based assay for detection of antibodies. In some embodiments, antibodies of the present disclosure are not immobilized on a solid or substrate, but can be used in a solution-based assay for detection of an allergenic antigen. Such assays are well-known in the art and comprise contacting an antigen (or antibody) with a test sample to allow formation of an antigen-antibody complex. Detect of a label provides a measure for the presence of antibodies (or antigen, as applicable) in a test sample.

[0402] In some embodiments, the present disclosure provides methods for detecting the presence of a complex of an allergenic antigen and an antibody in a fluid sample. In some embodiments, an allergenic antigen may be a cross-reactive allergenic protein (for example an identified allergenic protein from Table 2, or a cross-reactive protein, e.g., from Tables 4-7 or 10-12) or a cross-reactive MHC-II-binding epitope peptide (e.g., from Tables 13-18, 20, or 22) that binds an antibody that is present in a test sample. A test sample may be a biological sample or may contain a biological sample (for example, diluted or undiluted, obtained from a subject).

[0403] In an exemplary method, a complex which may be immobilized to a solid support or substrate is detected by contacting the complex with a detectably labelled binding partner that specifically binds to the antibodies in the complex or that specifically binds to the antigen in the complex. The binding partner thus binds to the complex allowing for its detection. The complex with the detectable binding partner may be precipitated and detection of the label may be used as a measure of the peptide-antibody complex. For example, a second antibody such as a fluorescently-labeled antibody or enzymatically-labeled antibody may be used. In some embodiments, the solid support or substrate is a multi-well microtiter plate, or microarray slide or bead.

[0404] Contemplated methods may be used in a point of care type method on fresh biological samples, or on refrigerated, frozen, or otherwise preserved biological samples.

[0405] The disclosure provides, for example, methods for detecting at least two target antibodies in a biological sample comprising: contacting a first solid support comprising a first cross-reactive allergenic protein immobilized to the solid support or substrate with a biological sample; contacting a second solid support comprising a second cross-reactive allergenic protein immobilized to the solid support or substrate with the biological sample; and detecting the presence or absence of the two target antibodies.

[0406] The disclosure provides, for example, methods for detecting T-cells that bind to one or more cross-reactive epitopes of the present disclosure. In some embodiments, methods include contacting one or more cross-reactive allergenic proteins or one or more cross-reactive epitope peptides immobilized on a solid support or substrate with a biological sample that may contain T-cells (e.g., from peripheral blood mononuclear cells (PBMCs) or isolated T-cells) and detecting the binding of any T-cells with the one or more cross-reactive allergenic proteins or one or more cross-reactive epitope peptides using methods known in the art. Allergen-positive T-cells can be identified and isolated. Immunoglobulin genes can be amplified from the allergen-positive T cells using methods known in the art, for example, by performing RT-PCR protocols on single T-cells using kits commercially available from Invitrogen/Life Sciences Technologies, CA, USA. Amplification products of the PCR process can be then sequenced to determine the binding epitopes and the variable and light chain sequences of the antibodies.

### Diagnostic Methods

[0407] In one aspect, the present disclosure provides methods, compositions and kits for the detection and diagnosis in subjects of one or more allergies or food-intolerance. In some embodiments, one or more allergies or food-intolerance are unidentified or suspected allergies to cross-reactive allergenic proteins. Subjects may have one or more existing allergies and may be sensitized to one or more cross-reactive allergens or at risk of becoming sensitized to one or more cross-reactive allergenic proteins. For example, a subject may have an existing single food allergy to a food source listed in Table 2 (e.g., a peanut allergen ara h1) and may have either become sensitized to one or more allergenic proteins that are cross-reactive with ara h1 or be at risk of becoming sensitized to one or more allergenic proteins that are cross-reactive with ara h1. The methods provided herein may, for example, be useful for assessing a biological sample obtained from such an individual to determine the presence of an immune response to such one or more cross-reactive allergenic proteins, e.g., the presence of cross-reactive antibodies (IgE, IgG4, etc.), and/or the presence or activation of a cellular response in T-cells, basophils, mast cells, granulocytes etc. In some embodiments, it may be desirable to assess cytokine release and/or degranulation in such subjects.

[0408] The disclosure also provides allergenic profiles of subjects and methods of preparing such allergenic profiles. Such profiles and/or assays may be used to determine foods to which a subject is allergic or tolerized (or at risk of becoming tolerized/desensitized) to improve treatment of a subject and/or a subjects' quality of life. Methods provided herein may be used, for example, for the preparation of allergenic profiles or AllerMaps for each food source for each individual. Such personalized allergenicity maps may, for example, be useful for tracking and monitoring existing allergies and for preventing development of suspected or unidentified allergies to cross-reactive allergenic proteins. Accordingly, the disclosure also provides methods for the determination of serological or allergenic profiles of subjects including providing a biological sample comprising cross-reactive antibodies, performing assays on the biological sample to confirm the presence of cross-reactive B-cell and/or WIC-binding T-cell epitope antigens in the biological sample of the subject, and using such information to generate a profile of the subject.

[0409] In some embodiments, disclosed methods are used to monitor efficacy of a therapy (e.g., a multiple allergen oral immunotherapy) in subjects. Differences in IgE and/or IgG binding to proteins (or peptides thereof) before, during, and/or after multiple allergen oral immunotherapy treatment may, for example, be monitored. By analyzing changes in patterns of IgE and/or IgG (e.g., IgG4) binding, efficacy of a treatment may, for example, be determined. Such methods may, for example, be used to rapidly screen large numbers of populations to determine the effects of multiple allergens on a population.

[0410] In some embodiments, provided herein are methods of detecting development of and/or achievement of tolerance to a multiple allergen oral immunotherapy in a subject being administered the multiple allergen oral immunotherapy, or of monitoring the efficacy of multiple allergen oral immunotherapy in a subject being administered the multiple allergen oral immunotherapy. Contemplated methods comprise: (a) obtaining a biological sample from the subject (for example, before, after, or during one or more intervals of administration); (b) contacting the biological sample with one or more identified allergenic proteins present in the multiple allergen oral immunotherapy and/or one or more immunologically cross-reactive proteins; (c) measuring immune response/markers in the biological sample to the identified allergenic proteins present in the multiple allergen oral immunotherapy and/or one or more immunologically cross-reactive proteins; and/or (d) comparing the measured immune response/markers with a previous measurement, to assess the efficacy of the multiple allergen oral immunotherapy. Immune response/markers that may be measured include, but are not limited to, the presence or binding of cross-reactive IgE and/or IgG (e.g., IgG4), T-cell proliferation (Th1/Th2 shift), activation of basophils, mast cells, cytokine release (differences in non-terminally differentiated T-cell produced cytokines (IFNγ, IL-10) and terminally differentiated Th2-produced cytokines (IL-4, IL-5, IL9, IL-13, IL-15, and IL-17)), degranulation (histamine, Serotonin), etc. In some embodiments, methods comprise measuring the presence or amount (e.g., concentration) of IgE or IgG (e.g., IgG4), binding of IgE or IgG (e.g., IgG4), and/or a T-cell response (as further described in Example 10) to one or more identified allergenic proteins and/or one or more immunologically cross-reactive proteins; and comparing the presence or amount (e.g., concentration) of IgE or IgG (e.g., IgG4), binding of IgE or IgG (e.g., IgG4), or T-cell response with a previous measurement of the presence or amount (e.g., concentration) of IgE or IgG (e.g., IgG4), binding of IgE or IgG (e.g., IgG4), or T-cell response to assess the efficacy of the multiple allergen oral immunotherapy.

[0411] Any appropriate immune response may be measured and used to indicate tolerance. For example, Th2 cell proliferation may be reduced, e.g., as determined using an assay described in the Examples. The magnitude of Th2 cell proliferation reduction may vary, and in certain instances may range from 1.2× to 10×, such as 2× to 4×. Specific IgG4 levels may be increased and the magnitude of IgG4 level increase may vary, and in certain instances may range from 1.2× to 100×, such as 2× to 6×. Specific IgE levels may be reduced and the magnitude of IgE level reduction may vary, and in certain instances may range from 1.1× to 7×, such as 2× to 6×.

[0412] Provided herein are methods for assessing the presence or absence of cross-reactive IgE antibodies that bind to one or more allergenic proteins, or T-cells recognizing T-cell epitopes on one or more allergenic proteins (e.g., cross-reactive allergenic proteins described herein). In some embodiments, one or more allergenic proteins are present in a multiple allergen oral therapeutic composition administered to a subject. Contemplated methods include, for example, contacting a biological sample obtained from a subject with one or more identified allergenic proteins (for example, that are included in a multiple allergen oral therapeutic composition administered to a subject). Binding of IgE antibodies and/or T-cells to one or more identified allergenic proteins may, for example, be measured as described in the Examples or by methods known in the art. In some embodiments, methods disclosed herein are used to determine whether one or more identified allergenic proteins that bind to IgE antibodies and/or T-cells present in a biological sample are cross-reactive to any additional allergenic proteins. In some embodiments, a method does not include testing the additional allergenic proteins in vitro or ex vivo for binding to IgE antibodies and/or T-cells and/or the additional allergenic proteins have not previously been tested in vitro or ex vivo for binding to IgE antibodies and/or T-cells. One or more identified allergenic proteins that may, for example, be used in such methods include those from any protein family listed in Table 3. In some embodiments, the one or more identified allergenic proteins are selected from the group consisting of a shrimp allergen, a cod allergen, a salmon allergen, a hen's egg allergen, a cow's milk allergen, a peanut allergen, a sesame allergen, a soy allergen, a pecan allergen, a cashew allergen, a hazelnut allergen, a walnut allergen, a pistachio allergen, an almond allergen, and a wheat allergen. In some embodiments, the one or more identified allergenic proteins are selected from Table 2. Additional or untested allergenic proteins or peptides can be any cross-reactive allergenic protein or cross-reactive epitope peptide. In some embodiments, additional or untested allergenic proteins (which may or may not be cross-reactive) are from a family selected listed Table 3, or are from the Cupin family (Tables 5 and 10). In some embodiments, the identified allergenic proteins and the additional or untested allergenic proteins are from the same protein family. In some embodiments, the identified allergenic proteins and the additional or untested allergenic proteins are from different protein family.

[0413] In some embodiments, one or more identified allergenic proteins are immobilized on a substrate or a solid support. Substrates and solid supports suitable in the context of the present disclosure are described above. In some embodiments, the substrate is a bead. In some embodiments, one or more identified allergenic proteins are present in an array.

[0414] Contemplated methods include obtaining or testing a biological sample from a subject at any time or interval prescribed by a health professional (e.g., an allergist or a physician). For example, a biological sample may be obtained from a subject before treatment, during treatment, and/or post-treatment. By way of illustration, a biological sample may be obtained at baseline (for example, prior to initiating a therapy, e.g., a multiple allergen oral therapy) and then again during treatment at one or more intervals, for example, daily, every other day, weekly, biweekly, semi-monthly, monthly, upon completion of treatment or achieving tolerization or desensitization, etc.

[0415] Biological samples can be any suitable biological sample. In some embodiments, a biological sample is selected from the group consisting of whole blood, serum, plasma, sputum, blood cells (e.g., peripheral blood mononuclear cells (PBMC), T-cells, B-cells, basophils, etc.), immune cells, tissue samples, biopsy samples, urine, tears, peritoneal fluid, pleural fluid, breast duct fluid, breast exudate, breast milk, breast fluids, saliva, semen, mucous, lymph, cytosol, ascites, amniotic fluid, bladder washes, and bronchioalveolar lavage or cells therefrom. Patient samples may be fresh or frozen, and may be treated, e.g., with heparin, EDTA, citrate or any other suitable treatment known in the art. In some embodiments, a biological sample is whole blood, serum, plasma, or peripheral blood mononuclear cells (PBMC).

### XII. KITS

[0416] In another aspect, the disclosure provides kits for the detection and/or characterization of allergy. In some embodiments, the kits contain one or more identified allergenic proteins, one or more immunologically cross-reactive allergenic proteins, and/or one or more cross-reactive epitope peptides that binds to antibodies such as IgE, IgG (e.g., IgG4), IgA, IgM and IgD, or to T-cells or to MHC-II molecules. In some embodiments, kits contain detection reagents and buffers. In some embodiments, kits contain reagents specific for detection of cross-reactive IgE and/or IgG antibodies. In some embodiments, kits contain IgE-specific and/or IgG-specific (e.g., IgG4-specific) labeling reagents. In some embodiments, kits contain all of the components necessary to perform a detection or a diagnostic assay, including all controls, labeling agents, buffers (including binding buffers, wash buffers, and detection buffers), and instructions for use. In some embodiments, any necessary software for identification of cross-reactive allergenic proteins and identified allergenic proteins, and for analysis and presentation of results are included.

[0417] In certain embodiments, provided herein are kits for biological cross-reactivity IgE and/or IgG assays comprising six or more distinct proteins, each bound to a solid support. Solid supports suitable for use in kits include substrates described above or those known in the art. In some embodiments, a solid support is a bead, an array or a microplate. In some embodiments, six or more distinct proteins are selected from the group consisting of identified allergenic proteins listed in Table 2. In some embodiments, six or more distinct protein are selected from the group consisting of allergenic proteins listed in Table 3. In some embodiments, the six or more distinct proteins are selected from those listed in Tables 2, 4-7 and 10-12. In some embodiments, kits further contain a IgE-specific and/or IgG-specific (e.g., IgG4-specific) labeling reagent, packaged together with allergenic proteins and instructions for use.

[0418] In some embodiments, provided herein are detection kits comprising six or more specific IgE or IgG antibodies each bound to a solid support or substrate, wherein the six or more specific IgE or IgG antibodies are antibodies to B-cell epitopes selected from the group of B-cell epitopes set forth in Tables 19, 21, and 23. Solid support or substrates that may be included in the kits are described above. In some embodiments, each solid support is a bead. In some embodiments, the kit further comprises an IgE or IgG specific labeling reagent and instructions for use. In some embodiments, the labeling agents may be packaged together with the specific antibodies and instruction for use. In some embodiments, the kit further comprises one or more of a binding buffer, a wash buffer and a detection buffer.

[0419] Kits, compositions, and methods disclosed herein may, for example, be useful in potency testing for multiple allergen oral immunotherapeutic compositions.

[0420] In some embodiments, kits contain a immunotherapeutic composition, for example, an immunotherapeutic composition disclosed herein. In some embodiments, kits comprise one or more of an identified allergenic protein, a cross-reactive allergenic protein, and/or a cross-reactive epitope. In some embodiments, kits comprise one or more antibodies, e.g., antibodies disclosed herein. Identified allergenic proteins, cross-reactive allergenic proteins, cross-reactive epitopes, and/or antibodies may be provided in a solution or in lyophilized form. In some embodiments, kits comprise vaccines, antibodies, polypeptides, and/or polynucleotides, vectors, oligonucleotides/primers, host cells, and the like. In some embodiments, kits comprise four or more cross-reactive epitope peptides from a cross-reactive allergenic protein in a pharmaceutically acceptable carrier, and instructions for use. In some embodiments, kits comprise four or more cross-reactive epitope peptides from an identified allergenic protein in a pharmaceutically acceptable carrier, and instructions for use. In some embodiments, kits comprise a single allergen immunotherapeutic composition. In some embodiments, kits comprise a multiple allergen immunotherapeutic composition, for example an oral, parenteral, nasal, or topical immunotherapeutic composition.

### XIII. TREATMENT, PREVENTION, MONITORING

[0421] The present disclosure provides, for example, methods for parallel tolerization in subjects to not only allergies to known food allergenic proteins and but also to cross-reactive allergenic proteins that are present in additional food sources and non-food allergens. In one aspect, the present disclosure provides methods for tolerization in subjects with allergies, food intolerances, epitope-sensitive conditions, disorders or diseases, and any other conditions that would benefit from the administration of the compositions of the present disclosure. In certain embodiments, contemplated methods improve immune health, immune-mediated health, immune balance, gut health, and/or quality of life. In certain embodiments, contemplated methods treat and/or prevent allergies (e.g., food allergies), food intolerances, B-cell epitope-sensitive, MEW-binding epitope-sensitive, and T-cell epitope-sensitive conditions, disorders or diseases, inflammatory disorders, and/or autoimmune disorders.

[0422] In an exemplary method, a subject having an existing allergic disease (e.g., allergy or food-intolerance) to one or more allergenic proteins (for example, from Table 2) is administered a multiple allergen immunotherapeutic composition (e.g., orally, nasally, parenterally, topically etc.) comprising one or more allergenic proteins (for example, from Table 2). In certain embodiments, an allergenic protein also boosts the resistance of a subject to an other allergen, or tolerizes or treats an allergy to an other allergen in a subject (known or undiagnosed, unidentified, or suspected). In some embodiments, the other allergen is not included in the multiple allergen immunotherapeutic composition. It is contemplated that multiple allergen immunotherapeutic compositions comprising at least one allergenic protein (or cross-reactive T-cell epitope present in the allergenic protein) to which the subject has a primary allergy or food-intolerance, when administered to a subject, may also, for example, treat an additional known, unidentified, undiagnosed or suspected allergy to one or more cross-reactive allergenic proteins.

[0423] In another exemplary method, a subject having an existing allergic disease (e.g., allergy or food-intolerance) to one or more identified allergenic proteins (for example, from Table 2) is administered a multiple allergen immunotherapeutic composition (e.g., oral, nasal, parenteral, topical etc.) comprising one or more cross-reactive allergenic proteins (e.g., Cupin proteins from Tables 5 or 10) to which the subject has no known or diagnosed allergy but which are cross-reactive to the one or more identified allergenic protein to which the subject is known to be allergic. In some embodiments, the one or more identified allergenic proteins are not included in the multiple allergen immunotherapeutic composition. It is contemplated that multiple allergen immunotherapeutic compositions comprising one or more cross-reactive allergenic proteins (or cross-reactive T-cell epitope present in the allergenic protein), when administered to a subject, may also, for example, treat the known or primary allergy or food-intolerance in the subject mediated by the one or more identified allergenic proteins.

[0424] In another exemplary method, a subject may be administered a multiple allergen oral immunotherapeutic composition comprising not only one or more identified allergenic proteins to which the subjects are allergic or have food-intolerance, but also one or more cross-reactive allergenic proteins. It is contemplated that the inclusion of the one or more cross-reactive allergenic proteins in the multiple allergen compositions may, for example, boost the resistance of the subjects to the one or more identified allergenic proteins to which the subject is allergic or has food intolerance or other cross-reactive T-cell epitope-sensitive conditions, disorders and disease. It is also contemplated that, in certain embodiments, through use of cross-reactive allergenic proteins, subjects may be administered lower doses of one of more identified allergenic proteins to which the subject is allergic. Such lower or suboptimal doses of primary allergenic proteins when combined with cross-reactive allergenic proteins may, for example, function to elicit an immune response in the subject.

[0425] In another exemplary method, it is contemplated that if a subject has an undiagnosed, unidentified, or a suspected allergy to a cross-reactive allergenic protein in addition to an existing allergy to an identified allergenic protein, then administration of a multiple allergen immunotherapeutic composition comprising either one or more identified allergenic proteins or one or more cross-reactive allergenic proteins or comprising both can induce an immune response and/or parallel tolerization to both allergens in the subject.

[0426] In another exemplary method, it is contemplated that if a subject has a food allergy or food-intolerance and is administered a multiple allergen immunotherapeutic composition comprising an identified allergenic proteins or cross-reactive allergenic protein present in a food, in certain embodiments, depending on the allergenic protein selected for inclusion in the immunotherapeutic composition, such immunotherapeutic composition may, for example, induce an immune response against a cross-reactive allergenic protein present in a non-food source. For example, a multiple allergen oral immunotherapeutic composition comprising one or more identified allergenic proteins from Table 2 that belong to the tropomyosin protein family and are present in a food (e.g., tropomyosin family proteins present in shrimp) may, for example, induce an immune response against a cross-reactive allergenic protein in the tropomyosin family present in cockroaches and/or dust mites. Additionally, for example, a multiple allergen oral immunotherapeutic composition comprising one or more identified allergenic proteins from Table 2 that belongs to the Bet v 1 protein family are present in food (e.g., Bet v 1 family proteins present in peanut or walnut) may, for example, induce an immune response against a cross-reactive allergenic protein in the bet v 1 family present in white oak tree pollen or birch pollen. It is contemplated that such methods have parallel tolerizing effects on primary allergens as well as cross-reactive allergens.

[0427] Subjects can be, for example, administered such multiple allergen compositions orally, parenterally, nasally or topically.

[0428] Accordingly, in one aspect the present disclosure provides methods for treatment of subject that are multi-allergic or have the potential to become multi-allergic. In some embodiments, subjects have two or more allergies or food-intolerances. Such two or more diseases may be directed to identified allergenic proteins or to cross-reactive allergenic proteins or to both. In another aspect, the present disclosure provides methods for the treatment of subjects that have undiagnosed, suspected, or unidentified allergies or food-intolerances. In some embodiments, subjects have an existing allergy and may have another allergy directed to a cross-reactive allergenic protein that is undiagnosed, suspected, or unidentified. As can be appreciated from the exemplary methods provided above, identification of identified allergenic proteins, cross-reactive allergenic proteins, and cross-reactive T-cell epitopes by the methods of the present disclosure are believed to provide advantages for methods, compositions, and kits for the treatment, prevention, monitoring, and management of allergies and food-intolerances, autoimmune diseases, as well as any cross-reactive T-cell epitope-sensitive disorders, diseases or conditions.

[0429] In some embodiments, subjects are humans. Subject may be infants, juveniles or adults. In some embodiments, subject may be pregnant adults or in utero or unborn children. As such, in certain embodiments, a subject is an infant younger than 1 year of age, whereas in other embodiments the subject is older, e.g., 1 year old or more, 5 years old or more, etc., and including adults. In some embodiments, subjects are non-human mammals.

[0430] In some embodiments, subjects in need thereof may be administered a composition of the present disclosure for treatment, prevention, and/or monitoring of allergies, food-intolerances, or any diseases or epitope-sensitive conditions.

[0431] In some embodiments, subjects have a single food allergy or single food-intolerance. In some embodiments, subjects have two or more allergies or food-intolerances or subjects are multi-allergic or multi-food-intolerant. In some embodiments, multi-allergic subjects having a single food allergy or single food-intolerance (primary allergy) may have or be at risk of developing another allergy or another food-intolerance, which may as yet be undiagnosed, unidentified, or suspected. In some embodiments, based on a subject's clinical/medical history (or food diaries that may be maintained by a subject or subject's family or caregivers), any of a physician, allergist, other health care professional, subject, parent, and/or caregiver may request the subject be screened for another allergy. Such “another allergy” or “another food-intolerance” may be directed to one or more allergenic proteins having cross-reactivity with the subjects' one or more primary allergens (e.g., one or more identified allergenic proteins in a food source which a subject has an existing allergy). Such another allergy may also be interchangeably referred herein to as a “cross-reactive allergy.” One or more cross-reactive allergenic proteins disclosed herein or one or more cross-reactive allergenic proteins identified or identifiable by the methods of the present disclosure may be cross-reactive with one or more primary allergens of the subjects' existing allergies or food-intolerances and pose a threat of sensitizing such subjects and/or developing an allergy to such cross-reactive allergenic proteins. Subjects may have or develop cross-reactive IgE antibodies or cross-reactive T-cells that recognize cross-reactive epitopes on primary allergenic proteins as well as any cross-reactive allergenic proteins that may be present in a subject. It is contemplated that, in certain embodiments, if such cross-reactive IgE antibodies or cross-reactive T-cells are present, such subjects may benefit from and are candidates for treatment with a multiple allergen immunotherapy. Such subjects may, for example, be administered an effective amount of a multiple allergen oral composition, for example, a composition disclosed herein.

[0432] Subjects having two or more allergic diseases (e.g. allergies) may be administered a multiple allergen oral immunotherapeutic composition comprising a shrimp allergen, a cod allergen, a salmon allergen, a hen's egg allergen, a cow's milk allergen, a peanut allergen, a sesame allergen, a soy allergen, a pecan allergen, a cashew allergen, a hazelnut allergen, a walnut allergen, a pistachio allergen, an almond allergen, and a wheat allergen. In some embodiments, the subjects may be administered a multiple allergen oral immunotherapeutic composition comprising one or more cross-reactive allergenic proteins from protein families provided in Table 3 or Table 4. In some embodiments, the subjects may be administered a multiple allergen oral immunotherapeutic composition comprising one or more cross-reactive allergenic proteins provided in Tables 4-7 and 10-12. In some embodiments, the subjects may be administered a multiple allergen oral immunotherapeutic composition comprising one or more Cupin family proteins or cross-reactive MHC-binding T-cell epitopes from Tables 13-19 that are derived from one or more Cupin family proteins. In some embodiments, the subjects are administered a multiple allergen oral composition comprising one or more the Cupin family proteins from Tables 5 or 10. In some embodiments, the subjects are administered a multiple allergen oral composition comprising one or more of the cross-reactive allergenic proteins Ber_e_2, Car_i_2, Fag_e_1, Fag_e_13S, Fag_t_13S_globulin, Jug_n_4, Lup_a_vicilin, Lup_an_1, Pin_k_2, Pis_s_1, Pis_s_2, Pis_v_2, Ses_i_3, Ses_i_6, Ses_i_7, Sin_a_2, Vig_r_2, Car_i_4, Gly_m_5, Gly_m_6, Jug_r_4, Len_c_1 or Pru_du_6. In some embodiments, the subjects are administered a multiple allergen oral composition comprising one or more cross-reactive epitope peptides present on cross-reactive allergenic proteins Ber_e_2, Car_i_2, Fag_e_1, Fag_e_13S, Fag_t_13S_globulin, Jug_n_4, Lup_a_vicilin, Lup_an_1, Pin_k_2, Pis_s_1, Pis_s_2, Pis_v_2, Ses_i_3, Ses_i_6, Ses_i_7, Sin_a_2, Vig_r_2, Car_i_4, Gly_m_5, Gly_m_6, Jug_r_4, Len_c_1 or Pru_du_6. In some embodiments, the subjects are administered a multiple allergen oral composition comprising four or more cross-reactive epitope peptides present on cross-reactive allergenic proteins Ber_e_2, Car_i_2, Fag_e_1, Fag_e_13S, Fag_t_13S_globulin, Jug_n_4, Lup_a_vicilin, Lup_an_1, Pin_k_2, Pis_s_1, Pis_s_2, Pis_v_2, Ses_i_3, Ses_i_6, Ses_i_7, Sin_a_2, Vig_r_2, Car_i_4, Gly_m_5, Gly_m_6, Jug_r_4, Len_c_1 or Pru_du_6. In some embodiments, the subjects are administered a multiple allergen oral composition comprising four or more cross-reactive epitope peptides per protein present on two or more of cross-reactive allergenic proteins selected from the group consisting of Ber_e_2, Car_i_2, Fag_e_1, Fag_e_13S, Fag_t_13S_globulin, Jug_n_4, Lup_a_vicilin, Lup_an_1, Pin_k_2, Pis_s_1, Pis_s_2, Pis_v_2, Ses_i_3, Ses_i_6, Ses_i_7, Sin_a_2, Vig_r_2, Car_i_4, Gly_m_5, Gly_m_6, Jug_r_4, Len_c_1 and Pru_du_6.

[0433] In some embodiments, the multiple allergen immunotherapeutic compositions comprise one or more allergenic proteins or peptides that are cross-reactive with one or more cross-reactive allergenic proteins present in identified protein families of Table 3. In some embodiments, the multiple allergen immunotherapeutic compositions comprise one or more allergenic proteins or peptides that are cross-reactive with one or more cross-reactive allergenic proteins provided in Tables 4-7 or 10-12. In some embodiments, the multiple allergen immunotherapeutic compositions comprise one or more allergenic proteins or peptides that are cross-reactive with one or more cross-reactive allergenic proteins provided in Tables 4-7 or 10-12. In some embodiments, the multiple allergen immunotherapeutic compositions comprise one or more allergenic proteins or peptides that are cross-reactive with one or more cross-reactive allergenic MHC-II binding peptides provided in Tables 13-18, 20, and 22.

[0434] Non-limiting examples of other allergies and other food-intolerances include allergies and food-tolerances directed to food sources of Table 8 or disclosed herein. In some embodiments, a subject's other allergy is not an allergy to an allergenic protein included in a multiple allergen composition administered to the subject.

[0435] Subjects in need of treatment, prevention and/or monitoring may, for example, be first identified as having an existing allergy to a primary (first) allergen (food source or an identified allergenic protein). This can be performed, for example, by screening a subject's medical or clinical history. Then, subjects' undiagnosed or unidentified allergy (or food-intolerance) or subjects' risk of developing another allergy or food-intolerance to another food source containing one or more cross-reactive allergenic protein may be determined. Presence of another allergy or food-intolerance may, for example, be confirmed by testing either by skin prick test or by a bioassay performed on a biological sample obtained from the subject. The potential for developing another (additional) food allergy or food-intolerance may, for example, be determined by obtaining or having obtained a biological sample from the subjects and assessing the biological sample using the methods of the present disclosure. For example, a biological sample can be assessed for one or more immune markers or immune response upon exposure of the biological sample to an identified allergenic protein and one or more cross-reactive allergenic proteins of the present disclosure as described herein or by other methods known in the art. Immune response or immune markers that may be assessed in a biological sample obtained from a subject include: presence of cross-reactive antibodies (e.g., IgE, IgG such as IgG4, IgM, IgD, and IgA), Th1/Th2 profile, for example presence of Th2 cells indicating allergic profile, activation of other immune cells such as basophils, granulocytes, eosinophils and mast cells, release of cytokines indicative of Th2 (e.g., IL-4, IL-5, IL9, 11-13, IL-17 etc.) and of Th1 or undifferentiated T-cells such as TNFγ and IL-10, and/or degranulation (e.g., histamine and/or serotonin).

[0436] Also provided herein are methods for testing if a subject is a candidate for a multiple allergen oral immunotherapy, which includes assessing the subject for an unidentified allergy (or unidentified food-intolerance) by detecting the presence of IgE antibodies or T-cells in a biological sample from the subject that binds with one or more cross-reactive allergenic proteins (for example, cross-reactive allergenic proteins disclosed herein). If, for example, binding of IgE antibodies and/or T-cells to one or more cross-reactive allergenic proteins is detected, then that subject may be a candidate for administration of a multiple allergen oral immunotherapy. In some embodiments, the methods further comprise identifying a subject as having an allergy or food-intolerance to a single food having one or more identified allergenic proteins.

[0437] Administration of an oral immunotherapeutic composition comprising at least two or more identified allergenic proteins or peptides thereof to a patient having an allergy or at risk of having an allergy to one or more of the two of more identified allergenic proteins may, for example, boost resistance in the patient to the protein compared to treatment with one identified allergenic protein alone. Administration of an oral immunotherapeutic composition comprising at least two or more cross-reactive allergenic proteins or peptides thereof to a patient having an allergy or at risk of having an allergy to one or more of the two of more cross-reactive allergenic protein may, for example, boost resistance in the patient to the protein compared to treatment with one cross-reactive allergenic protein alone. In some embodiments, subjects are administered an oral immunotherapeutic composition comprising three or more isolated cross-reactive allergenic proteins.

[0438] In some embodiments, patients are administered two or more Cupin family proteins. In some embodiments, patients are administered three or more Cupin family proteins.

### Methods for Induction of Tolerization (Cross-Tolerization or Parallel Tolerization)

[0439] The present disclosure provides, for example, methods of administering a multiple allergen immunotherapeutic composition (for example, oral composition) to a subject to induce tolerization to multiple allergens which are cross-reactive allergens, for example, to induce tolerization to multiple allergens including a primary allergen (for example an identified allergenic protein) and one or more additional allergens that are cross-reactive with the primary allergen (e.g., the identified allergenic protein). Typically, multi-allergic subjects will have two or more existing allergies. Some subjects may be intolerant to two or more allergens or identified allergenic proteins. As a non-limiting example, two or more allergens could be from Table 1 or Table 2. However, some subjects may have one existing allergy that can be ascertained by review of their medical/clinical history and food diaries and may also have one or more unidentified or undiagnosed allergies or food-intolerances. The present disclosure provides that such unidentified and/or undiagnosed allergies or intolerances may be to one or more allergens that are cross-reactive to one or more of their primary allergens. Such subjects may show symptoms of poor immune health conditions, poor gut health, food-intolerance and/or allergies. Accordingly, provided herein are methods for treatment and monitoring of such multi-allergic subjects (e.g., subjects having 2 or more allergies) and of subjects having 2 or more food-intolerances. Further, some subjects in addition to having one or more existing allergy or food-intolerance may have become or may be at risk of becoming sensitized to additional allergenic proteins that are cross-reactive with one or more of their primary allergens.

[0440] The present disclosure provides, for example, methods for prevention, monitoring and treatment of subjects having or at risk of having an allergy or intolerance to one or more cross-reactive allergenic proteins that is cross-reactive with one or more of their primary allergenic proteins. Such subjects may, for example, be administered a multiple allergen oral immunotherapeutic composition of the present disclosure. By way of illustration only, a subject having known allergies to peanuts, cashews, and walnuts and having a potential or risk for developing an allergy or food intolerance to buckwheat (based on cross-reactivity of one or more allergenic proteins present in buckwheat to one or more of the allergenic proteins present in peanuts, cashews, and/or walnuts), can be treated with a multiple allergen oral immunotherapeutic composition containing one or more of the allergenic proteins present in peanuts, cashews, and walnuts (but not one or more cross-reactive allergenic proteins present in buckwheat) to induce parallel desensitization in the subject to not only peanuts, cashews, and walnuts, but also to buckwheat. Desensitization can be detected, for example, by the presence of cross-reactive IgEs in a biological sample obtained from the subject and assessed using any of the methods of the present disclosure. In this example, it is contemplated that the subject's resistance to buckwheat and its cross-reactive allergenic proteins may, for example, be increased as an effect of the one or more identified allergenic proteins of peanuts, cashews, and walnuts present in the multiple allergen oral immunotherapeutic composition. Further, inclusion of multiple allergenic proteins in a multiple allergen oral composition has an added benefit of increasing the diversity of allergenic epitopes to which subjects are exposed.

[0441] It is contemplated that in methods for promoting parallel tolerization to different allergens a subject may, for example, achieve tolerance to each allergen at different rates, e.g., tolerance to each allergen may be achieved within different periods of time even if treatment for each allergen is initiated at the same time using the same allergenic immunotherapy.

[0442] In some embodiments, subjects have an allergy or food intolerance to one or more foods listed in Table 1. In some embodiments, subjects have an allergy or intolerance to one or more identified allergenic proteins listed in Table 2.

[0443] Treatment with multiple allergen oral immunotherapy may, for example, manifest in the form of a modulation of a surrogate immune marker of a disease condition. For example, Th2 cell proliferation may be reduced, e.g., as determined using the assay described in the Examples below. The magnitude of Th2 cell proliferation reduction may vary, and in certain instances may range from 1.2× to 10×, such as 2× to 4×. Shift in Th1/Th2 balance may be reversed, as determined by using a Th1/Th2 panel bioassay such as that commercially available from Thermo Fisher Scientific, USA. Th1 and Th2 cytokines release may be determined. Any of IL-4, IL-5, IL9, 11-13, IL-17 and/or other cytokine indicators of Th2 cells as well as TNFγ, IL-10 and other indicators of non-terminally differentiated T-cells or Th1 cells may be determined using the methods disclosed herein and otherwise known in the art. Levels of exemplary cytokines IL-4, IL-5, IL9, 11-13 and/or IL-17 may be reduced and TNFγ and IL-10 may be increased as determined by using a Th1/Th2 panel bioassay.

[0444] In some embodiments, the presence or absence of cross-reactive antibodies may also be determined. For example, specific and cross-reactive IgG4 levels may be increased, e.g., as determined using a bioassay of the present disclosure. The magnitude of IgG4 level increase may vary, and in certain instances may range from 1.2× to 100×, such as 2× to 6×. As another example, specific and cross-reactive IgE levels may be reduced. The magnitude of IgE level reduction may vary, and in certain instances may range from 1.1× to 7×, such as 2× to 6×.

[0445] As another non-limiting example, activation of basophils (indicating IgE-mediated immune response) may be determined as further described in Example 10. A decrease in the activation of basophils would be indicative of tolerance.

[0446] Allergy symptoms that may be ameliorated by the methods disclosed herein include, but are not limited to: eczema, asthma, atopic dermatitis, bronchospasm, cough, rhinorrhea, angioedema, gastric hypermotility, urticaria (hives), pruritis, fatigue, bradycardia, and/or hypotension. The magnitude of the symptom reduction may vary, where in some instances the magnitude is 2-fold or greater, e.g., 5-fold or greater, including 10-fold or greater, e.g., as compared to a suitable control. In some instances, treatment of an allergy results the subject being cured of the allergy, such that the subject no longer suffers from the allergy.

[0447] In some embodiments, subjects with one or more allergies (for example, a single food allergy or two more food allergies of which at least one may be undiagnosed, or at least one may be unidentified as to its allergen) are administered a multiple allergen oral immunotherapy.

### Methods for Improving Gut Health

[0448] Provided herein in some embodiments are methods of increasing gut health of subjects having an intolerance to one or more food allergens. Such methods may, for example, result in the subject having an enhanced maintenance of healthy microbiota, or improving the resilience of microbiota, for instance, by reducing the numbers or colonization of pathogenic bacteria or viruses, or by maintaining and improving the intestinal integrity and barrier function. Gut health or gut balance may be characterized by inflammation, for example, when T cell proliferation is decreased (e.g., as described in greater detail below in the Examples), or there is a shift in Th1/Th2 balance. The magnitude of gut health enhancement may vary, where in some instances the magnitude is 2-fold or greater, e.g., 5-fold or greater, including 10-fold or greater, e.g., as compared to a suitable control.

### Methods for Improving Immune Health of Subjects

[0449] Provided herein, in some embodiments, are methods of increasing immune health or immune balance of a subject. In some embodiments, disclosed methods result in a subject having an improved immune response to a given challenge. In some embodiments, disclosed methods result in subjects having improved immune response to an existing allergy (or food-intolerance) as well as a suspected or hitherto undiagnosed or unidentified allergy (or food-intolerance) to a cross-reactive allergenic protein (e.g., an additional allergenic protein that is cross-reactive with the allergenic protein of the existing allergy). Immune health or immune balance may be characterized by inflammation, decrease of cross-reactive IgE, increase of cross-reactive IgG4 in plasma, or decrease of Th2 response, degranulation, and/or activation of basophils, granulocytes, and/or mast cells (e.g., as described in greater detail below in the Examples). The magnitude of immune health enhancement may vary, where in some instances the magnitude is 2-fold or greater, e.g., 5-fold or greater, including 10-fold or greater, e.g., as compared to a suitable control.

### Methods of Decreasing the Potential of the Subject for Developing an Immune Mediated Condition

[0450] Provided herein are methods of decreasing the potential of or a risk for the subject for developing an immune mediated condition, such as an immune-mediated inflammatory disease condition. Potential of or risk for developing an immune-mediated condition due to sensitization to cross-reactive allergenic proteins may exist in subjects having an existing food allergy or existing food-intolerance or are sensitized to allergens or antigens that are also implicated in an immune-mediated condition or are cross-reactive with an antigen implicated in an immune-mediated condition. For example, to determine risk reduction, if 100 different subjects were administered the composition, 20% or more of the subjects would show a decrease in their immune markers, e.g., IgE, as compared to the control group. The magnitude of the decrease in potential may vary, where in some instances the magnitude is 2-fold or greater, e.g., 5-fold or greater, including 10-fold or greater, e.g., as compared to a suitable control. Accordingly, provided herein are methods of preventing subjects from developing an immune mediated condition. As such, the methods of the present disclosure include administering a multiple allergen oral immunotherapeutic composition of the present disclosure to a subject that is not known to have or does not have an immune mediated condition. While the subject may not have or may not be known to have the immune mediated condition, the subject may be one that is suspected to be or known to be at risk of developing the immune mediated condition. In some embodiments, the subjects may have one or more food allergies or food-intolerances. In some embodiments, the subjects have at least one single food allergy. Subjects having a single food allergy, may be one that is suspected to be or known to be at risk for developing immune mediated condition.

### Methods for Improving Quality of Life

[0451] Provided herein are methods for improving quality of life (QoL) of a subject with two or more allergies or food-intolerances. The methods include administering to the subject a multiple allergen immunotherapeutic composition. Subjects who suffer from allergies and/or food-intolerances have a reduced QoL. Subjects administered with multiple allergen immunotherapeutic compositions, for example, orally, are likely to have an improvement in QoL. In some embodiments, subjects are informed that they are being administered to multiple allergen oral immunotherapeutic compositions to treat their allergies or food-intolerances (not a placebo). Knowledge of such treatment improves subjects' QoL.

[0452] Before, during or after an multiple allergen oral immunotherapy, a subject may undergo a QoL assessment. Even absent allergic reactions, subject having allergies suffer impaired QoL, including from the fear and anxiety of accidental ingestion of allergens, fear of allergic reactions, financial burden of allergies, social restrictions, etc. Subjects and their families and caregivers devote a significant time for food selections, for example, vetting and validating them by reading food labels, inquiring of ingredients in unlabeled foods, or by food avoidance in environments with potential for food cross-contamination. Anxiety and depression are often observed in subjects with allergies and food intolerance and in their families and caregivers.

[0453] Methods for measuring QoL, such as disease-related QoL, before, during, or after multiple allergen oral immunotherapy are developed and validated for the measurement of QoL in subjects with subjects having or at risk of having one or more food allergies and/or food-intolerances. Common methods for assessing QoL employ questionnaire designed to assess one or more domains, across one or more issues each of the burden imposed by food allergy or food-intolerance (for example for a single food allergy, for two or more food allergies, etc.) in qualitative and quantitative terms. Exemplary questionnaires are generally: (1) valid, (2) reproducible, (3) responsive, and (4) interpretable. QoL questionnaires are generally age-appropriate and validated. QoL questionnaires are selected from: Food allergy quality of life-parental burden questionnaire, Food Allergy Impact Scale, Food Allergy Independent Measure, Food Allergy Independent Measure child form, Food Allergy Independent Measure teen form, Food Allergy Independent Measure adult form, Food Allergy Independent Measure parent form, Food Allergy Parent Questionnaire, Child Health Questionnaire Parental form, Food Allergy Self-Efficacy Scale for parents, Pediatric Allergic Disease QoL Questionnaire, Food Allergy QoL Questionnaire-parent form, Food Allergy QoL questionnaire child form, Food Allergy QoL questionnaire-teenager form, Food Allergy QoL Assessment Tool for Adolescents, You and Your Food Allergy Questionnaire, the Food Allergy QoL-adult form, the 36-item short form health survey, a EuroQoL EQ-5D, such as EuroQoL EQ-5D Youth, 5-Level EQ-5D, the Hospital anxiety and Depression Scale, the Allergy to Peanuts Impacting Emotions and Life survey, and the Pediatric QoL Inventory. Such QoL questionnaires may be proxy reported or self-reported.

[0454] Improvement in QoL is a change between at least 2 points in time. One of skill in the art will understand that improvement is with respect to a particular instrument (such as a particular QoL questionnaire or other QoL assessment). As a non-limiting example, if a subject's QoL is assessed by a QoL questionnaire, then an improvement is an improvement in the score of the same QoL questionnaire. In some embodiments, the improvement is clinically significant, such as equal to or greater than the questionnaire's minimal clinical important difference (MCID). In some embodiments, the improvement is a change in a domain score, or a total score, of a QoL questionnaire between one time point such as baseline measurement, to a second time point such a time point during or after multiple allergen oral immunotherapy. Each domain of QoL questionnaire is measured on a scale from 1 to 7, with 7 being the worst quality of life.

[0455] Improvement in a subject's QoL may persist (including continuing to improve) for a period of time after completion of multiple allergen oral immunotherapy. The improvement may persist for about at least 1 month, 2 months, 3 months, 6 months, 9 months, 12 months, 18 months, 24 months, 36 months, 48 months, or 60 months. In some embodiments, the subjects' QoL is improved for any of about at least 1 month, 2 months, 3 months, 6 months, 9 months, 12 months, 18 months, 24 months, 36 months, 48 months, or 60 months while the subjects continue to be administered a multiple allergen oral immunotherapy composition according to a multiple allergen oral immunotherapy schedule. In some embodiments, the subject's QoL is improved for any of about at least 1 month, 2 months, 3 months, 6 months, 9 months, 12 months, 18 months, 24 months, 36 months, 48 months, or 60 months after the subject has achieved a peak desensitization to at least one allergen in the multiple allergen oral immunotherapy or to at least one cross-reactive allergen (such as by measurement by oral food challenge or by assessing a biological sample obtained from the subject for immune markers such as presence IgE).

[0456] The appropriate dosage of the allergenic proteins (e.g., identified allergenic proteins, cross-reactive allergenic proteins) and/or cross-reactive epitope peptides of the present disclosure may depend on a variety of factors. Such factors may include, but are in no way limited to, a patient's physical characteristics (e.g., age, weight, sex), whether the cross-reactive epitope is being used as single agent, multiple agent (e.g., multiple epitopes from a single allergenic protein and/or from two or more distinct cross-reactive allergenic proteins) or adjuvant therapy, the type of MHC restriction of the subject, the progression (or pathological state) of the food allergy or food-intolerance or other epitope-sensitive conditions, and other factors that may be recognized by one skilled in the art. In general, a cross-reactive epitope or combination of cross-reactive epitopes may be administered to a subject in an amount of from about 50 μg to about 5 mg. In some embodiments, dosage may be in an amount of from about 50 μg to about 500 μg.

[0457] The vaccines may be administered by any suitable parenteral, oral, nasal, and/or topical methods, including, but not limited to, systemic injections (e.g., subcutaneous, epicutaneous, intradermal, intramuscular, intravenous, etc.), mucosal administration (e.g., nasal, ocular, oral, vaginal, anal, etc.), topical administration (e.g., by a patch or a tape delivery), or by any other pharmacologically appropriate method. In some embodiments, the vaccines are administered by gene delivery methods known in the art. The vaccine may be administered for delivery at particular time intervals or in a single administration. For example, for a subcutaneous administration, exemplary dose of 50 μg of one or more cross-reactive peptides adsorbed on alum may be administered via inject on 3 occasions at 2-week intervals. The number of injections can vary depending on multiple factors.

### T-Cell Therapy

[0458] In another aspect, the present disclosure relates to antigen-specific T-cells, for example, regulatory T-cells (T-regs) or suppressor T-cells. In some embodiments, subjects are administered the cross-reactive allergenic proteins and cross-reactive MHC-II binding epitopes of the present disclosure to induce the presence of T-regs in vaccinated individuals or individuals administered T-cell epitope therapy. In some embodiments, subjects are administered a multiple allergen oral immunotherapy (comprising vaccines or across-reactive MHC-II binding T-cell peptides) and T-regs are collected from the subjects and clones are propagated. The antigen-specific T-regs that are obtained from the subjects can be used for immunotherapy, for example by amplification of the T-reg clones, for the treatment, prevention of allergy and other autoimmune diseases. Allogenic and autogenic cells may be used.

### Routes of Administration

[0459] The administration route employed in a given method may vary, e.g., depending on the nature of the allergen immunotherapeutic composition. As reviewed above, physiologically acceptable compositions that include a multiple allergen composition may be formulated for delivery to a subject using a variety of different administration routes, such as but not limited to: oral, parenteral, nasal, and topical administration. As such, aspects of the methods may include orally, parenterally, nasally and topically, etc., administering a multiple allergen composition or physiologically acceptable composition that includes multiple allergens disclosed herein to a subject.

### Dosing Schedule

[0460] A dosing schedule may vary as desired or prescribed by a clinician or other health professionals, and may depend on a number of different factors, e.g., purpose of the administration, age of the subject, condition of the subject, nature of the physiologically acceptable composition, etc.

[0461] Subjects may, for example, be administered multiple allergen oral immunotherapy by regular exposure to increasing doses of multiple allergen oral immunotherapeutic compositions. Protocols for multiple allergen oral immunotherapy may, for example, involve updosing (also sometimes called a build-up phase) and/or a maintenance phase. A multiple allergen oral immunotherapy can further include an optional initial escalation phase. An initial escalation phase may, for example, involve exposure to small doses of allergens over the course of several hours (e.g. or more) to two days. These small doses may, for example, be increased until the subject reaches a goal dose or a highest tolerated dose (HTD) for the initial escalation phase. A subject then usually begins an updosing phase. Additional multiple allergen oral immunotherapy may, for example, include a maintenance phase involving continued administration of multiple allergen oral immunotherapeutic compositions for a period of time. One goal of the multiple allergen oral immunotherapy is establishing a desensitized state, wherein a subject being treated is less likely to suffer a severe or life-threatening allergic reaction upon accidental exposure to the primary allergens and/or the cross-reactive allergens, for example, establishing parallel tolerization to multiple allergens (those present in the multiple allergen oral immunotherapeutic composition as well as other allergens that are cross-reactive with allergens present in multiple allergen oral immunotherapeutic compositions is induced in the subject). In some embodiments, desensitization or tolerance is clinical tolerance.

[0462] In certain embodiments, a multiple allergen composition or physiologically acceptable composition that includes the same is administered to a subject on an hourly basis, on an every few hours basis (e.g., every 2, 3, 4, 6, 8, 12 hours), on a daily basis, on a weekly basis, on a bi-weekly basis, on a monthly basis, on a bimonthly basis, on a quarterly basis, on a semi-annual basis, on an annual basis, etc., for a treatment period of time. The treatment period of time may also vary, for example, in some instances the treatment period of time is 1 day or longer, 1 week or longer, 2 weeks or longer, 1 month or longer, 3 months or longer, 6 months or longer, 1 year or longer, 2 years or longer, 3 years or longer, 5 years or longer, 10 years or longer, etc., up to the life of the subject.

### XIV. EXEMPLARY EMBODIMENTS

[0463] Embodiment 1. A method of identifying additional allergenic proteins that are cross-reactive with one or more allergenic proteins present in a multiple allergen oral immunotherapy comprising:
[0464] (a) performing one or more in silico bioinformatics steps to identify additional allergenic proteins that are homologous to one or more identified allergenic proteins (reference protein(s)) present in the multiple allergen oral immunotherapy, wherein the homology is based on full-length proteins;
[0465] (b) determining a cross-reactivity score of each of the identified additional allergenic proteins within a protein family with respect to a reference protein; wherein the reference protein is an allergenic protein within the protein family and present in the multiple allergen oral immunotherapy; and
[0466] (c) identifying one or more additional allergenic proteins as a cross-reactive allergenic protein based on homology and/or the cross-reactivity score of each additional allergenic protein with respect to the reference protein.
[0467] Embodiment 2. The method of embodiment 1, wherein the protein family is selected from the group consisting of: Tropomyosin, EF hand family (Beta-parvalbumin), ATP:guanido phosphotransferase (Arginine Kinase), Triosephosphate isomerase, Fructose bisphosphate aldolase class I, Alpha/beta casein, Lipocalin, Kappa-casein, Transferrin, C-type lysozyme/alpha-lactalbumin family, Serum albumin, Enolase, Serpin serine protease inhibitor, Kazal-type serine protease inhibitor, Collagen, Lipoprotein, Prolamin superfamily, Cupin, Profilin, Bet v 1 family, Oleosin, Isoflavone reductase family, Plant defensin, 60S acidic ribosomal protein, Heat shock protein Hsp70, Fe/Mn superoxide dismutase, Papain-like cysteine protease, Thaumatin-like protein, Unclassified, GILT family, Hevein-like and class I/II chitinase, Zinc finger, C3HC4 type (RING finger), SCAI family, Peroxidase, Serpin serine protease inhibitor, Thionin, Thioredoxin, Transcription elongation factor 1, Lipid transfer protein, and Triosephosphate isomerase.
[0468] Embodiment 3. The method of embodiments 1 or 2, the method further comprising mapping one or more cross-reactive epitopes such as a B-cell epitope, a T-cell epitope or an MHC-binding epitope on each protein within the protein family member.
[0469] Embodiment 4. The method of embodiment 3, wherein cross-reactive epitopes of embodiment 3 are correlated with the one or more identified allergenic proteins present in the multiple allergen oral therapeutic and/or one or more cross-reactive allergenic protein.
[0470] Embodiment 5. The method of embodiments 1-4, the method further comprising mapping one or more cross-reactive epitopes such as a B-cell epitope, a T-cell epitope or an MHC-binding epitope on a subset of proteins with the protein family comprising one or more identified allergenic protein and/or one or more cross-reactive allergenic protein.
[0471] Embodiment 6. The method of embodiments 3-5, one or more cross-reactive epitopes binds to one or more, 2 or more, 3 or more, 4 or more, 5 or more, 6 or more 7 or more, 8 or more 9 or more, or 10 or more MHC class II molecules.
[0472] Embodiment 7. The method of any of preceding embodiments, wherein the multiple allergen oral immunotherapy comprises one or more food sources selected from the group consisting of shrimp, cod, salmon, hen's egg, cow's milk, peanut, sesame, soy, pecan, cashew, hazelnut, walnut, pistachio, almond, and wheat.
[0473] Embodiment 8. The method of any of preceding embodiments, wherein the multiple allergen oral immunotherapy comprises shrimp, cod, salmon, hen's egg, cow's milk, peanut, sesame, soy, pecan, cashew, hazelnut, walnut, pistachio, almond, and wheat.
[0474] Embodiment 9. The method of any of preceding embodiments, wherein the one or more the identified allergenic protein is selected from the group consisting of a shrimp allergen, a cod allergen, a salmon allergen, a hen's egg allergen, a cow's milk allergen, a peanut allergen, a sesame allergen, a soy allergen, a pecan allergen, a cashew allergen, a hazelnut allergen, a walnut allergen, a pistachio allergen, an almond allergen, and a wheat allergen.
[0475] Embodiment 10. The method of any of preceding embodiments, wherein the one or more of the identified allergenic proteins present in the multiple allergen oral immunotherapy is selected from the group consisting of identified allergens listed in Table 2.
[0476] Embodiment 11. The method of any of the preceding embodiments, wherein the additional allergenic proteins are one or more of the additional allergenic proteins provided in: Table 4.
[0477] Embodiments 12. The method of any of the preceding embodiments, wherein the identified cross-reactive allergenic proteins have a cross-reactivity score of ≥0.5 with respect to the reference protein and/or have ≥70% Homology to the reference protein.
[0478] Embodiments 13. The method of any of the preceding embodiments, wherein the identified cross-reactive allergenic proteins in the Cupin protein family are provided in: Tables 5 or 10.
[0479] Embodiments 14. The method of any of the preceding embodiments, wherein the identified cross-reactive epitopes are provided in Tables 13-23.
[0480] Embodiment 15. The method of embodiment 14, wherein the at least one or more MHC class II molecule to which a cross-reactive epitope of Embodiment 14 binds is provided in Tables 13-23.
[0481] Embodiment 16. The method of any of the preceding embodiments, wherein the method further comprises determining homology and/or a cross-reactivity score of each full-length additional allergenic protein with respect to a full-length reference protein that is not one or more of the identified allergenic proteins present in the multiple allergen oral immunotherapy, wherein cross-reactivity score of >0.5 and/or a homology of at least 70% with respect to the reference protein will identify additional cross-reactive allergenic proteins.
[0482] Embodiments 17. The method of any of the preceding embodiments, wherein the method further comprises generating an allergenic map (AllerMap) of a food source, wherein generating the AllerMap comprises mapping all identified allergenic proteins present in a food source and cross-reactive allergenic proteins that are not present in the food source.
[0483] Embodiment 18. The method of any of the preceding embodiments, wherein the one or more bioinformatics steps comprises applying one or more algorithms to determine the homology of one or more of the full-length additional allergenic proteins to one or more of the identified allergenic proteins in a multiple allergen oral immunotherapy based on pairwise identity and similarity.
[0484] Embodiment 19. The method of any of the preceding embodiments, wherein the one or more bioinformatics steps comprises applying one or more algorithms to determine the cross-reactivity score of one or more of the additional allergenic proteins with respect to the one or more of the identified allergenic proteins within the protein family.
[0485] Embodiment 20. The method of any of the preceding embodiments, wherein the method further comprises one or more bioinformatic steps for obtaining a structural model of identified allergenic proteins present in the multiple allergen oral immunotherapy and identifying surface exposed amino acids on one or more of the cross-reactive allergenic proteins or one or more of cross-reactive epitope.
[0486] Embodiment 21. A computer-implemented method for identification of additional allergenic proteins that are cross-reactive with one or more identified allergenic proteins present in multiple allergen oral immunotherapy, comprising:
[0487] (a) receiving, in a computer processing system, a data input comprising a first dataset comprising a plurality of identified allergenic protein sequences present in a multiple allergen oral immunotherapy and a second dataset comprising a plurality of additional allergenic protein sequences within the protein family; and
[0488] (b) performing one or more bioinformatic steps comprising:
[0489] (i) applying one or more algorithms to compare each of the plurality of additional allergenic protein sequences present in second dataset to one or more of the plurality of identified allergenic protein sequences present in the first dataset and determining homology based on pairwise identity and similarity of each of the plurality of additional allergenic protein sequences in second dataset and each of the plurality of identified allergenic protein sequences in the first dataset; and
[0490] (ii) applying one or more algorithms for determining a cross-reactivity score for each of the plurality of additional allergenic protein sequences in the second dataset and/or the dataset with respect to a reference protein sequence to identify cross-reactivity of each of the plurality of additional allergenic protein sequences in the second dataset to the reference protein; wherein the reference protein sequence is an identified allergenic protein sequences present in multiple allergen oral immunotherapy; and
[0491] (c) identifying one or more additional allergenic protein sequences from the second dataset as cross-reactive with one or more identified allergenic sequences in the first dataset if the one or more additional allergenic protein has a cross-reactivity score of ≥0.5 and/or at least 70% homology to the reference protein.
[0492] Embodiment 22. A non-transitory computer-readable medium storing thereon executable instructions, that when executed by a computer, causes the computer to execute a method for identification of allergenic protein sequences that are cross-reactive to one or more allergenic proteins present in multiple allergen oral immunotherapy, the method comprising:
[0493] (a) receiving, in a computer processing system, a data input comprising a first dataset identified allergenic protein sequences present in a multiple allergen oral immunotherapy and a second dataset comprising a plurality of additional allergenic protein sequences within a protein family;
[0494] (b) applying an algorithm to compare each of the plurality of additional allergenic protein sequences present in second dataset to one or more of the plurality of identified allergenic protein sequences present in the first dataset and determining homology based on pairwise identity and similarity of each of the plurality of additional allergenic protein sequences in second dataset and each of the plurality of identified allergenic protein sequences in the first dataset;
[0495] (c) applying an algorithm for determining a cross-reactivity score for each of the plurality of additional allergenic protein sequences in the second dataset and/or the dataset with respect to an reference protein sequence to identify cross-reactivity of each of the plurality of additional allergenic protein sequences in the second dataset to the reference protein; wherein the reference protein sequence is an identified allergenic protein sequences present in multiple allergen oral immunotherapy; and
[0496] (d) identifying one or more additional allergenic protein sequences from the second dataset as cross-reactive with one or more identified allergenic sequences in the first dataset, wherein the identified cross-reactive additional allergenic protein and has a cross-reactivity score of ≥0.5 and/or at least 70% homology to a reference protein.
[0497] Embodiment 23. A non-transitory computer-readable storage medium encoded with a computer program including instructions executable by a digital processing device to create an application, the application comprising:
[0498] (a) a software module configured to obtain data input comprising a first dataset comprising a plurality of identified allergenic protein sequences present in a multiple allergen oral immunotherapy and a second dataset comprising a plurality of additional allergenic protein sequences within a protein family;
[0499] (b) a software module configured to apply an algorithm to compare each of the plurality of additional allergenic protein sequences present in second dataset with one or more of the plurality of identified allergenic protein sequences present in the first dataset and determining homology based on pairwise identity and similarity of each of the plurality of additional allergenic protein sequences in second dataset and each of the plurality of identified allergenic protein sequences in the first dataset;
[0500] (c) a software module configured to apply an algorithm for determining a cross-reactivity score for each of the plurality of additional allergenic protein sequences in the second dataset and/or the dataset with respect to a reference protein sequence to identify cross-reactivity of each of the plurality of additional allergenic protein sequences in the second dataset to the reference protein; wherein the reference protein sequence is an identified allergenic protein sequences present in multiple allergen oral immunotherapy; and
[0501] (d) a software module for identifying one or more of the plurality of additional allergenic protein sequences from the second dataset as cross-reactive with one or more of the plurality of identified allergenic sequences in the first dataset, wherein the identified cross-reactive additional allergenic protein has a cross-reactivity score of ≥0.5 and/or at least 70% homology to a reference protein.
[0502] Embodiment 24. A computer-implemented system, comprising:
[0503] (a) a digital processing device comprising an operating system configured to perform executable instructions, and a memory device;
[0504] (b) a computer program including instructions executable by a digital processing device to create an application comprising;
[0505] (i) a software module configured to obtain data input comprising a first dataset comprising a plurality of identified allergenic protein sequences present in a multiple allergen oral immunotherapy and a second dataset comprising a plurality of additional allergenic protein sequences within a protein family;
[0506] (ii) a software module configured to apply an algorithm to compare each of the plurality of additional allergenic protein sequences present in second dataset with one or more of the plurality of identified allergenic protein sequences present in the first dataset and determining homology based on pairwise identity and similarity of each of the plurality of additional allergenic protein sequences in second dataset and each of the plurality of identified allergenic protein sequences in the first dataset;
[0507] (iii) a software module configured to apply an algorithm for determining a cross-reactivity score for each of the plurality of additional allergenic protein sequences in the second dataset and/or the dataset with respect to a reference protein sequence to identify cross-reactivity of each of the plurality of additional allergenic protein sequences in the second dataset to the reference protein; wherein reference protein sequence is an identified allergenic protein sequences present in multiple allergen oral immunotherapy; and
[0508] (iv) a software module configured for identifying one or more additional allergenic protein sequences from the second dataset having a cross-reactivity score of >0.5 and/or at least 70% homology to an reference protein as a cross-reactive allergenic protein, wherein the reference protein is an identified allergenic protein present in the multiple allergen oral immunotherapy and the identified cross-reactive allergenic protein sequence from the first dataset is not present in the multiple allergen oral therapy.
[0509] Embodiment 25. The method of any one of embodiments 21-24, wherein the method comprises generating an allergenic map of all allergenic proteins identified to be present in a food sources and all cross-reactive allergenic proteins to at least one of the identified allergenic proteins present in the food source.
[0510] Embodiment 26. The method of any one of embodiments 21-25, wherein method further includes generating an in silico library comprising a plurality of peptides derived from the plurality of additional allergenic protein sequences in the second Dataset.
[0511] Embodiment 27. The method of embodiment 26, wherein the peptides are overlapping 5-200 mers with a sliding window of 1-5 amino acids.
[0512] Embodiment 28. The method of embodiment 26 or 27, wherein the peptides are overlapping 8 mer-15-mer peptides with a sliding window of 1-5 amino acids.
[0513] Embodiment 29. The method of any one of embodiments 26-28, wherein the method further comprises obtaining a third dataset comprising a plurality of T-cell epitope peptides present in food allergens and applying an alignment algorithm to each of the plurality of peptides in the in silico library with the plurality of T-cell epitope peptides present in third dataset to determine homology (based on pair-wise identity and similarity) and generate an in silico T-cell epitope peptide library comprising a plurality of T-cell epitope peptides identified as present on cross-reactive allergenic proteins.
[0514] Embodiment 30. The method of embodiment 29, wherein the method further comprises obtaining a fourth dataset comprising a plurality of MHC-II-binding T-cell epitopes and applying an alignment algorithm to each of plurality of the identified T-cell epitope peptides in the T-cell epitope library to identify a plurality of peptides comprising MHC-II-binding T-cell epitopes based on homology (based on 70% identity and 80% coverage of the peptides).
[0515] Embodiment 31. The method of any one of embodiments 5-30, wherein the binding affinity (IC50) of one or more of the plurality of peptides comprising an MHC-II binding T-cell epitope ranges from 500 nM Kd to 1 nM Kd.
[0516] Embodiment 32. The method of any one of embodiment 5-31, wherein the binding affinity (IC50) of one or more of the plurality of peptides comprising MHC-II binding T-cell epitope peptides is ≤100 nM Kd.
[0517] Embodiment 33. The multiple allergen oral composition of embodiment 1 further comprising one or more cross-reactive allergenic proteins.
[0518] Embodiment 34. A method for identification of identifying cross-reactive allergenic proteins that are cross-reactive with one or more identified allergenic protein present in a food source comprising:
[0519] (a) performing one or more in silico bioinformatics steps to identify additional allergenic proteins that are homologous to the one or more identified allergenic proteins within a protein family; and/or
[0520] (b) determining a cross-reactivity score of each of the additional allergenic proteins within the protein family with respect to each of the identified allergenic proteins; and
[0521] (c) identifying one or more additional allergenic proteins as a cross-reactive allergenic protein based on minimal acceptable homology and/or a minimal acceptable cross-reactivity score of each additional allergenic protein with respect to the reference protein.
[0522] Embodiment 35. The multiple allergen composition of embodiment 34, wherein the homology is based on pairwise identity and similarity comparison of full-length proteins and the minimal acceptable homology is at least 70%.
[0523] Embodiment 36. The multiple allergen composition of embodiment 34, wherein the minimal acceptable cross-reactivity score is ≥0.5.
[0524] Embodiment 37. The multiple allergen composition of any one of embodiments 34-36, wherein the method further comprises mapping cross-reactive epitopes on one or more of the identified allergenic proteins and/or one or more cross-reactive allergenic proteins within the family.
[0525] Embodiment 38. The multiple allergen composition of embodiment 37, wherein the mapping of cross-reactive epitope comprises a method, the method further comprising: providing a providing a dataset comprising a plurality of peptide K-mers with a sliding window of 1 to 10 amino acids derived from all allergenic proteins within the protein family; providing another dataset comprising a plurality of experimentally-validated epitopes, wherein the experimentally-validated epitopes are T-cell epitopes and/or MHC-II-binding epitopes and/or B-cell epitopes; performing one or more bioinformatics steps to identify the presence or absence of experimentally-validated T-cell epitopes and/or MHC-II-binding epitopes and/or B-cell epitopes on each of the allergenic proteins within the protein family.
[0526] Embodiment 39. The method of embodiment 38, wherein the one or more bioinformatics steps comprise: performing an alignment algorithm on the dataset the plurality of peptide K-mers with a sliding window of 1 to 10 amino acids and the dataset comprising the plurality of experimentally-validated epitopes.
[0527] Embodiment 40. The method of embodiment 38 or 39, wherein the one or more bioinformatics steps comprises performing an alignment algorithm to map the experimentally-validated T-cell epitopes and/or MHC-II-binding epitopes and/or B-cell epitopes on each of the allergenic proteins within the protein family to identify cross-reactive epitopes (experimentally-validated T-cell epitopes and/or MHC-II-binding epitopes and/or B-cell epitopes) that are shared by or common to one or more identified allergenic proteins and one or more cross-reactive proteins within the protein family.
[0528] Embodiment 41. The methods of embodiment 39 or 40, wherein the alignment algorithm is BLASTP.
[0529] Embodiment 42. A computer-implemented method for identification of an allergenic protein that is cross-reactive with an identified allergenic protein present in a food source, comprising:
[0530] (a) receiving, in a computer processing system, a data input comprising a first dataset further comprising a plurality of full-length identified allergenic protein sequences and a second dataset comprising a plurality of full-length additional allergenic protein sequences within a protein family;
[0531] (b) applying an algorithm to compare each of the plurality of full-length additional allergenic protein sequences present in first dataset to one or more of the plurality of full-length identified allergenic protein sequences present in the second dataset, and determining homology (based pairwise identity and similarity) of each of the plurality of full-length additional allergenic protein sequences in first dataset to each of the plurality of full-length identified allergenic proteins sequences in the second dataset;
[0532] (c) applying an algorithm for determining a cross-reactivity score for each of the plurality of full-length additional allergenic protein sequences in the second dataset with respect to each full-length identified allergenic protein (a reference protein) sequence in the first dataset to predict cross-reactivity of each of the plurality of full-length additional allergenic protein sequences in the first dataset with respect to the reference protein; and
[0533] (d) identifying one or more full-length additional allergenic protein sequences from the second dataset as cross-reactive with one or more full-length Identified Allergenic Sequences in the first dataset, wherein the identified full-length cross-reactive allergenic protein is correlated as having at least 70% homology to a reference protein and/or a cross-reactivity score of >0.5 with respect to a reference protein.
[0534] Embodiment 43. A computer-implemented method for identification of cross-reactive epitopes shared by one or more identified allergenic protein present in a food source and one or more allergenic proteins within a protein family to which the one or more identified allergenic proteins belong, comprising:
[0535] (a) receiving, in a computer processing system, a data input comprising a first dataset further comprising a plurality of full-length allergenic protein sequences present in an identified protein family, wherein the plurality of full-length allergenic protein sequences comprise the one or more identified allergenic protein present in the food source, a second dataset comprising a plurality of overlapping peptide K-mers derived the plurality of full-length additional allergenic protein sequences from the first dataset; a third dataset comprising a plurality of validated T-cell epitopes; and/or a fourth dataset comprising a plurality of validated MHC-binding T-cell epitopes; and/or a fifth dataset comprising a plurality of validated B-cell epitopes;
[0536] (b) applying an algorithm to map the:
[0537] (i) plurality of validated T-cell epitopes in the third dataset on to the overlapping peptide K-mers of the second dataset to identify the presence of one or more validated T-cell epitopes in the second dataset;
[0538] (ii) plurality of validated MHC-binding T-cell epitopes in the fourth dataset on to the overlapping peptide K-mers of the second dataset to identify the presence of one or more validated MHC-binding T-cell epitopes in the second dataset;
[0539] (iii) plurality of validated B-cell epitopes in the sixth dataset on to the overlapping peptide K-mers of the second dataset to identify the presence of validated B-cell epitopes in the second dataset;
[0540] (c) applying an algorithm to the identified validated T-cell epitopes, WIC-binding T-cell epitopes, and/or the B-cell epitopes in (f) to each of the plurality of full-length allergenic proteins in the first dataset to identify the cross-reactive epitopes; and optionally,
[0541] (d) applying an algorithm to compare each of the plurality of full-length allergenic protein sequences present in the first dataset to each of the plurality of full-length allergenic protein sequences present in the first dataset, and determining homology (based on pairwise identity and similarity) of each of the plurality of full-length allergenic protein sequences in first dataset to each of the plurality of full-length allergenic protein sequences in the first dataset; wherein in each of the plurality of full-length allergenic proteins is a reference protein with respect to each of the plurality of full-length allergenic proteins in the first dataset;
[0542] (e) applying an algorithm for determining a cross-reactivity score for each of the plurality of full-length allergenic protein sequences in the first dataset with respect to each of the plurality of full-length allergenic protein sequence (each a reference protein) in the first dataset to identify cross-reactivity of each of the plurality of full-length allergenic protein sequences in the first dataset with respect to its reference protein;
[0543] (f) identifying one or more full-length allergenic protein sequences from the first dataset as cross-reactive with one or more full-length allergenic sequences in the first dataset, wherein the identified full-length cross-reactive allergenic protein has at least 70% homology to a reference protein and/or a cross-reactivity score of ≥0.5 with respect to a reference protein.
[0544] Embodiment 44. The method of embodiment 43, wherein the method further comprises correlating the identified cross-reactive epitopes of Step (g) to the identified cross-reactive allergenic proteins.
[0545] Embodiment 45. The method of embodiment 43 or 44, wherein the overlapping peptide K-mers range from 5 amino acids to 200 amino acids in length with a sliding window of 1 to 5 amino acids, from 7 to 150 amino acids in length with a sliding window of 1 to 5 amino acids, from 8 to 30 amino acids in length with a sliding window of 1 to 5 amino acids, from 9 amino acids to 25 amino acids in length with a sliding window of 1 to 5 amino acids.
[0546] Embodiment 46. The method of any one of embodiments 43-45, wherein the overlapping peptide K-mers is 14-mer or 15 mer with a sliding window of 1 to 5 amino acids.
[0547] Embodiment 47. The method of any one of embodiments 43-46, further comprises rank ordering each of the identified cross-reactive epitopes by
[0548] (a) the number of MHC molecules (and/or variants thereof) that each cross-reactive epitope binds; and/or
[0549] (b) the number of allergenic proteins in the first dataset carrying each cross-reactive epitope;
[0550] Embodiment 48. The method of any one of embodiments 43-47, further comprising selecting cross-reactive epitopes that are creative with 1 or more, 2 or more, 3 or more, 4 or more, 5 or more, 6 or more, 7 or more, 8 or more, 9 or more or 10 or more MHC molecules (and/or variants thereof).
[0551] Embodiment 49. The method of any one of embodiments 43-48, further comprising selecting cross-reactive epitopes that bind 1 to 150 MHC molecules.
[0552] Embodiment 50. The method of embodiment 49, wherein cross-reactive epitopes bind to at least 1 MHC molecule, at least 5 WIC molecules, at least 10 WIC molecules, at least 25 MHC molecules, at least 30 WIC molecules, at least 40 MHC molecules, at least 50 MHC molecules, at least 60 WIC molecules, at least 70 WIC molecules, at least 80 MHC molecules, at least 90 MHC molecules, or at least 100 WIC molecules (and variants thereof).
[0553] Embodiment 51. A composition comprising one or more cross-reactive allergenic protein or cross-reactive epitope identified by a method of any one of the embodiments 1-50.
[0554] Embodiment 52. The composition of embodiment 56, wherein the composition is a single allergen composition or a multiple allergen composition.
[0555] Embodiment 53. The multiple allergen composition of embodiment 51 or 52 wherein the multiple allergen composition comprises two or more allergenic proteins or two or more cross-reactive epitopes.
[0556] Embodiment 54. The multiple allergen composition of any one of embodiments 51-53, wherein the composition comprises:
[0557] (a) one or more identified allergenic proteins and one or more cross-reactive allergenic proteins; or
[0558] (b) two or more identified allergenic proteins and one or more cross-reactive allergenic proteins; or
[0559] (c) one or more of identified allergenic proteins provided in Table 2 and two or more cross-reactive allergenic proteins; or
[0560] (d) identified allergenic proteins provided in Table 2; or
[0561] (e) two or more cross-reactive allergenic proteins selected from the group of allergenic proteins provided in Table 4; or
[0562] (f) two or more cross-reactive allergenic proteins from Cupin family (Table 10); or
[0563] (g) three or more Cupin family proteins; or
[0564] (h) one or more proteins or cross-reactive epitope peptides selected from the group consisting of Ber_e_2, Car_i_2, Fag_e_1, Fag_e_13S, Fag_t_13S_globulin, Jug_n_4, Lup_a_vicilin, Lup_an_1, Pin_k_2, Pis_s_1, Pis_s_2, Pis_v_2, Ses_i_3, Ses_i_6, Ses_i_7, Sin_a_2, Vig_r_2, Car_i_4, Gly_m_5, Gly_m_6, Jug_r_4, Len_c_1 and Pru_du_6, or any combination thereof; or
[0565] (i) one or more identified proteins from Table 2 and one or more cross-reactive allergenic proteins from Cupin family; or
[0566] (j) one or more cross-reactive epitopes, wherein the one or more cross-reactive epitopes is T-cell epitope or an MHC-binding epitope or a B-cell epitope, or any combination thereof.
[0567] (k) one or more epitopes in a Cupin protein; or
[0568] (l) one or more cross-reactive epitopes of Tables 13-23; or
[0569] (m) at least four cross-reactive epitopes; or
[0570] (n) one or more food sources comprising one or more cross-reactive allergenic proteins or cross-reactive peptides; or
[0571] (o) one or more food sources comprising one or more identified allergenic proteins and one or more food sources comprising one or more cross-reactive allergenic proteins.
[0572] Embodiment 55. A multiple allergen oral immunotherapeutic composition comprising 3 or more Cupin family proteins and a pharmaceutically acceptable carrier, wherein the upon administration of the oral immunotherapeutic composition to a subject having an allergy or at risk of having an allergy to one or more the 3 or more Cupin family proteins, the subject has boosted resistance to the protein as compared to treatment with a single Cupin family protein alone; and/or is also treated for a different allergen in the Cupin family protein.
[0573] Embodiment 56. The multiple allergen oral immunotherapeutic composition of embodiment 55, wherein the Cupin family proteins are selected from the group provided in Table 5.
[0574] Embodiment 57. The multiple allergen oral immunotherapeutic composition of embodiment 55 or 56, wherein the Cupin family proteins is selected from the group provided in Table 10.
[0575] Embodiment 58. A multiple allergen oral immunotherapeutic composition comprising 12 or more cross-reactive epitopes from 3 or more Cupin family proteins and a pharmaceutically acceptable carrier, wherein each Cupin family protein provides at least 4 cross-reactive epitopes, and wherein the upon administration of the oral immunotherapeutic composition to a subject having an allergy or at risk of having an allergy to one or more the 3 or more Cupin family proteins, the subject has boosted resistance to the protein as compared to treatment with a single Cupin family protein alone; and/or is also treated a different allergen in the Cupin family protein.
[0576] Embodiment 59. A multiple allergen composition of any one of embodiments 51-58, wherein the cross-reactive allergenic proteins and/or cross-reactive epitopes are identified by any of the method of any one of embodiments 34-50.
[0577] Embodiment 60. The composition of embodiment 54 or 55, comprising at least 4 cross-reactive epitopes from one cross-reactive allergen selected from the allergenic proteins selected from an identified protein family provided in Table 3.
[0578] Embodiment 61. The composition of embodiment 60 comprising at least 4 cross-reactive epitopes from one cross-reactive allergen selected from Cupin family (Table 10).
[0579] Embodiment 62. A composition of any one of embodiments 51-61 that is formulated as an oral composition, a parenteral composition, a nasal composition, or a topical composition.
[0580] Embodiment 63. A cross-reactive epitope identified by the methods of any one of embodiments 41-50.
[0581] Embodiment 64. A cross-reactive epitope selected from Tables 13-23.
[0582] Embodiment 65. A vector comprising one or more cross-reactive epitopes of any one of embodiments 51-64.
[0583] Embodiment 66. A vector comprising at least 4 cross-reactive epitopes identified by the methods of any one of embodiments 34-50.
[0584] Embodiment 63. A host cell comprising the cross-reactive epitope of any one of embodiments 34-66.
[0585] Embodiment 64. A mouse comprising one or more cross-reactive epitopes of any one of embodiments 34-66.
[0586] Embodiment 65. A vaccine comprising one or more cross-reactive epitopes identified by a method of any one of embodiments 34-50.
[0587] Embodiment 66. A vaccine comprising one or more cross-reactive epitopes selected from Table 13-23.
[0588] Embodiment 67. A vaccine comprising at least 4 cross-reactive epitopes selected from Table 13-23.
[0589] Embodiment 68. A composition comprising a vaccine of embodiment 66 or 67.
[0590] Embodiment 69. A composition comprising a host cell comprising a vector of embodiment 65 or 66.
[0591] Embodiment 70. An antibody that binds to a cross-reactive epitope identified by the methods of any one of embodiments 34-50.
[0592] Embodiment 71. An antibody that binds to a cross-reactive MHC-binding cross-reactive epitope provided in Tables 13-23.
[0593] Embodiment 72. The antibody of embodiment 70 or 71, wherein the antibody is a specific IgE, IgG, IgA, IgM or IgD.
[0594] Embodiment 73. A composition comprising an antibody of any one of embodiments 70-72.
[0595] Embodiment 74. A method of preparing a multiple allergen oral immunotherapeutic composition that is capable of treating an allergy to one or more cross-reactive allergenic proteins comprising:
[0596] (a) identifying one or more cross-reactive allergenic proteins and/or at least four cross-reactive epitopes per protein on one or more cross-reactive allergenic protein that are cross-reactive allergenic with one or more identified allergenic protein in the multiple allergen oral immunotherapeutic composition by a method of any of the preceding embodiments (1-50); and
[0597] (b) selecting as components in the multiple allergen oral immunotherapeutic composition:
[0598] (i) two or more identified allergenic proteins, wherein the two or more allergenic proteins have at least 70% homology and/or a cross-reactive score of >0.5 with the one or more identified cross-reactive allergenic proteins; or
[0599] (ii) or more cross-reactive epitopes from step (a).
[0600] Embodiment 75. A method of preparing a multiple allergen oral immunotherapeutic composition that is capable of parallel tolerization of a subject having an existing food allergy and has an unidentified or undiagnosed allergy or at risk of having a second allergy to one or more cross-reactive allergenic proteins comprising:
[0601] (a) identifying one or more cross-reactive allergenic proteins and/or four or more cross-reactive epitopes per protein on one or more cross-reactive allergenic proteins that are cross-reactive with one or more identified allergenic proteins in the food to which the subject has an existing allergy by a method of any of the embodiments 1-50; and
[0602] (b) selecting as components in the multiple allergen oral immunotherapeutic composition
[0603] (i) the one or more cross-reactive allergenic proteins, wherein the one or more allergenic proteins have at least 70% homology and/or a cross-reactive score of ≥0.5 with the one or more identified cross-reactive allergenic proteins; and/or
[0604] (ii) four or more cross-reactive epitopes from step (a).
[0605] Embodiment 76. A method of embodiment 74 or 75, wherein the one or more identified allergenic proteins and/or one or more cross-reactive allergenic proteins belong to an identified protein family provided in Table 3.
[0606] Embodiment 77. The method of any one of embodiments 74-76, wherein the one or more identified allergenic proteins is selected from the group consisting of a shrimp allergen, a cod allergen, a salmon allergen, a hen's egg allergen, a cow's milk allergen, a peanut allergen, a sesame allergen, a soy allergen, a pecan allergen, a cashew allergen, a hazelnut allergen, a walnut allergen, a pistachio allergen, an almond allergen, and a wheat allergen.
[0607] Embodiment 78. The method of any one of embodiments 74-75, wherein the identified allergenic protein is selected from Table 2.
[0608] Embodiment 79. A multiple allergen oral immunotherapeutic composition comprising 3 or more Cupin family proteins and a pharmaceutically acceptable carrier, wherein the upon administration of the oral immunotherapeutic composition to a subject having an allergy or at risk of having an allergy to one or more the 3 or more Cupin family proteins, the subject has boosted resistance to the protein as compared to treatment with a single Cupin family protein alone; and/or is also treated for a different allergen in the Cupin family protein.
[0609] Embodiment 80. The multiple allergen oral immunotherapeutic composition of embodiment 79, wherein the Cupin family proteins are selected from the group provided in Table 5.
[0610] Embodiment 81. The multiple allergen oral immunotherapeutic composition of embodiment 79 or 80, wherein the Cupin family proteins is selected from the group provided in Table 10.
[0611] Embodiment 82. A method for identifying one or more specific antibodies useful for detection of an allergenic food antigen, comprising identifying one or more cross-reactive epitopes according to a method of any one of embodiments 1-50; and identifying the specific antibodies that bind to the identified cross-reactive B-cell epitopes.
[0612] Embodiment 83. The method of embodiment 82, wherein the one or specific antibodies is detected in an individual, a biological sample or a cell.
[0613] Embodiment 84. The method of embodiment 82 or 83, wherein the one or more specific antibodies bind to a cross-reactive allergenic protein or an identified allergenic protein that is immobilized to a solid support or a substrate.
[0614] Embodiment 85. The method of any one of embodiments 82-84, wherein the allergenic food antigen is from a food source provided in Table 1 or Table 8.
[0615] Embodiment 86. The method of embodiment 82, wherein the allergenic food antigen is a shrimp allergen, a cod allergen, a salmon allergen, a hen's egg allergen, a cow's milk allergen, a peanut allergen, a sesame allergen, a soy allergen, a pecan allergen, a cashew allergen, a hazelnut allergen, a walnut allergen, a pistachio allergen, an almond allergen, or a wheat allergen.
[0616] Embodiment 87. The method of any one of embodiments 82-86, wherein the allergenic food antigen is from identified protein family provided in Table 3.
[0617] Embodiment 88. The method of any one of embodiments 82-87, wherein the allergenic food antigen is a cross-reactive allergenic protein in Cupin protein family.
[0618] Embodiment 89. The method of embodiment 88, wherein the cross-reactive allergenic protein provided in Table 10.
[0619] Embodiment 90. The method of any one of embodiments 82-90, wherein one or more specific antibodies bind to a cross-reactive epitope identified by a method of any of the embodiments 1-41 immobilized on a solid support or a substrate.
[0620] Embodiment 91. The method of any one of embodiments 82-90, wherein one or more cross-reactive epitope identified by a method of any one of embodiments 1-50 is in a solution.
[0621] Embodiment 92. The method of any one of embodiments 82-90, wherein the one or more cross-reactive epitopes is from Tables 13-23.
[0622] Embodiment 93. The method of any one of embodiment 82-91, wherein the biological sample or the cell is immobilized on a solid support or substrate.
[0623] Embodiment 94. The method of any one of embodiments 82-93, wherein the specific antibody is IgE, IgG, IgA, IgM or IgD.
[0624] Embodiment 95. A method for detecting the presence of specific food antigens, comprising:
[0625] (a) providing one or more specific antibodies to a cross-reactive B-cell epitope;
[0626] (b) contacting a biological sample or a cell that may have an allergenic protein under conditions sufficient to permit binding of the specific antibodies to the cross-reactive B-cell epitope; and
[0627] (c) detecting the binding of the specific antibodies to identify specific food antigens.
[0628] Embodiment 96. The method of embodiment 95, wherein the specific antibody is an IgE, IgG, IgA, IgM or IgD.
[0629] Embodiment 97. The method of embodiment 95 or 96, wherein the specific food antigen is a food antigen from Tables 4-7 or 10-12.
[0630] Embodiment 98. The method of any one of embodiments 95-97, wherein the specific antibodies bind to a cross-reactive epitope identified by a method of any of the embodiments 1-50.
[0631] Embodiment 99. The method of any one of embodiments 95-98, wherein the specific antibodies bind to a cross-reactive epitope provided in Tables 13-23.
[0632] Embodiment 100. The method of any one of embodiments 95-99, wherein the specific antibody is immobilized on a solid support or substrate.
[0633] Embodiment 101. The method of any one of embodiments 84, 90, 93, or 100, wherein the solid support or substrate is a membrane, a filter, a chip, a slides (such as a microscopic slide), a wafer, a fiber, a magnetic or a non-magnetic bead, a gel, a tubing, a plate (such as a microtiter plate), microtiter strips, a polymer, a microparticle, a sphere, a microsphere, a nanosphere, a particle, a microparticle, a nanoparticle, or a capillary.
[0634] Embodiment 101. The method of embodiment 100, wherein the solid support or a substrate is an array (such as a microarray).
[0635] Embodiment 102. The method of embodiment 100 or 101, wherein the specific antibodies immobilized on the solid support or substrate are multiplexed.
[0636] Embodiment 103. The method of any one of embodiments 100-102, wherein six or more specific antibodies are immobilized on the solid support or a substrate.
[0637] Embodiment 104. The method of any one of embodiments 83-103, wherein the biological sample is selected from the group consisting of whole blood, serum, plasma, sputum, blood cells (e.g., peripheral blood mononuclear cells (PBMC), T-cells, B-cells, basophils, etc.), immune cells, tissue samples, biopsy samples, urine, tears, peritoneal fluid, pleural fluid, breast duct fluid, breast exudate, breast milk, breast fluids, saliva, semen, mucous, lymph, cytosol, ascites, amniotic fluid, bladder washes, and bronchioalveolar lavage.
[0638] Embodiment 105. A method of treating a subject for two or more allergies, comprising:
[0639] (a) identifying the subject as having an allergy to a single food having one or more identified allergenic proteins;
[0640] (b) assessing the subject for another allergy by the presence of IgE antibodies or T-cells that bind to one or more immunologically cross reactive proteins with one or more identified allergenic proteins, and if one or more additional allergies to other proteins are present; and
[0641] (c) administering a multiple allergen oral immunotherapy to the subject.
[0642] Embodiment 106. The method of embodiment 105, wherein the multiple allergen oral immunotherapy does not contain one or more of the immunologically cross reactive proteins.
[0643] Embodiment 107. The method of embodiment 105 or 106, wherein identifying the patient is identifying the patient's clinical history of a single food allergy.
[0644] Embodiment 108. The method of any one of embodiments 105-107, wherein the single food allergy is an allergy to a food source provided in Table 1.
[0645] Embodiment 109. The method of any one of embodiments 105-108, wherein the subject's allergy to another allergenic protein is not a protein included in the multiple allergen oral immunotherapeutic composition.
[0646] Embodiment 110. The method of any one of embodiments 105-109, wherein the multiple allergen oral immunotherapy comprises a shrimp allergen, a cod allergen, a salmon allergen, a hen's egg allergen, a cow's milk allergen, a peanut allergen, a sesame allergen, a soy allergen, a pecan allergen, a cashew allergen, a hazelnut allergen, a walnut allergen, a pistachio allergen, an almond allergen, and a wheat allergen.
[0647] Embodiment 111. The method of any one of embodiments 105-110, wherein the multiple allergen oral immunotherapy comprises the identified allergenic proteins of Table 2.
[0648] Embodiment 112. The method of any one of embodiments 105-111, wherein the one or more additional allergy is an allergy to one or more food sources provided in Table 8.
[0649] Embodiment 113. The method of any one of embodiments 105-112, wherein the one or more immunologically cross-reactive allergenic proteins are selected from the group provided in Table 4.
[0650] Embodiment 114. The method of any one of embodiments 106-113, wherein the one or more immunologically cross-reactive allergenic proteins are selected from the group provided in Tables 10-12.
[0651] Embodiment 115. A method for detecting development of clinical tolerance to and/or monitoring the efficacy of, a multiple-allergen immunotherapeutic composition in a subject being administered the multiple allergen immunotherapeutic composition and in need thereof, comprising:
[0652] (a) obtaining a biological sample from the subject at one or more intervals of administration;
[0653] (b) contacting the biological sample with one or more identified allergenic proteins present in the multiple allergen immunotherapeutic composition, one more immunologically cross reactive proteins and/or one or more cross-reactive epitopes;
[0654] (c) measuring the presence of or binding to IgE, IgG, and/or T-cells to the one or more identified allergenic proteins, one or more immunologically cross-reactive proteins and/or one or more cross-reactive epitopes;
[0655] (d) comparing, to assess the efficacy of the multiple allergen immunotherapeutic composition,
[0656] (i) the amount of unbound one or more identified allergenic proteins, unbound one or more immunologically allergenic proteins, or unbound one or more cross-reactive epitopes, and/or
[0657] (ii) the concentration of the IgE, IgG or T-cells with a previous measurement of the IgE, IgG and/or T-cells; and
[0658] where clinical tolerance is indicated when the amount of unbound one or more identified allergenic proteins present in the multiple allergen immunotherapy, unbound one more immunologically cross reactive proteins, or unbound one or more cross-reactive epitopes in the biological sample, or the concentration of the IgE, IgG or T-cells, is less than previously identified number of the one or more identified allergenic proteins, immunologically cross reactive proteins, and/or cross-reactive epitopes, or previous concentration of IgE, IgG or T-cell epitopes.
[0659] Embodiment 116. The method of embodiment 115, wherein the multiple allergen immunotherapeutic composition is a multiple allergen oral immunotherapeutic composition.
[0660] Embodiment 117. The method of embodiment 116, wherein the immunologically cross reactive proteins or the cross-reactive epitopes are immobilized on a solid support or substrate.
[0661] Embodiment 118. A method of assessing the presence or absence of cross-reactive IgE antibodies or cross-reactive T-cells in a biological sample, comprising:
[0662] (a) contacting the biological sample with one or more identified allergenic proteins;
[0663] (b) measuring the binding of IgE antibodies or T-cells to the one or more identified allergenic proteins;
[0664] (c) selecting the allergenic proteins that bind to the IgE antibodies or T-cells to obtain one or more binding allergenic proteins;
[0665] (d) comparing the similarity between the binding allergenic proteins and one or more untested allergenic proteins to assess the presence of one or more cross-reactive IgE antibodies or cross-reactive T-cells.
[0666] Embodiment 119. A method of assessing the presence or absence of cross-reactive IgE antibodies or cross-reactive T-cells in a biological sample, comprising:
[0667] (a) contacting the biological sample with one or more cross-reactive MHC-II-binding T-cell epitopes;
[0668] (b) measuring the binding of IgE antibodies or T-cells to the one or more cross-reactive MHC-II binding T-cell epitopes;
[0669] (c) selecting the cross-reactive that bind to the IgE antibodies or T-cells to obtain one or more binding cross-reactive MHC-II-binding epitopes;
[0670] (d) comparing the similarity between the binding cross-reactive MHC-II-binding epitopes and one or more untested cross-reactive MHC-II-binding epitopes to assess the presence of one or more cross-reactive IgE antibodies or cross-reactive T-cells.
[0671] Embodiment 120. A method for testing whether a patient is a candidate for a multiple allergen oral immunotherapy, comprising: assessing the patient for an unidentified allergy by detecting the presence of IgE antibodies or T-cell epitopes in a patient's biological sample that bind to one or more immunologically cross reactive proteins with one or more identified allergenic proteins, and if an unidentified allergy to other proteins is present; and if present, the patient is a candidate for administration of a multiple allergen oral immunotherapy.
[0672] Embodiment 121. A kit for a biological cross-reactivity IgE and/or IgG assay comprising six or more distinct proteins each bound to a solid support or a substrate, wherein the 6 or more distinct proteins are selected from the group consisting of Table 2, Table 4, and/or Table 10 proteins.
[0673] Embodiment 122. A detection kit comprising 6 or more specific IgE and/or IgG antibodies each bound to a solid support or substrate wherein the 6 or more specific IgE are antibodies to B-cell epitopes identified by a method of any of the embodiments 1-50.
[0674] Embodiment 123. The kit of embodiment 121 or 122, wherein each solid support is a bead.
[0675] Embodiment 124. The kit of any one of embodiments 121-123, further comprising an IgE and/or IgG specific labeling reagent and the distinct proteins.
[0676] Embodiment 125. The kit of any one of embodiments 121-124, further comprising one or more of a binding buffer, a wash buffer, and a detection buffer.
[0677] Embodiment 126. A kit comprising a single allergen or multiple allergen immunotherapeutic composition of any one of embodiments 51-73 and a pharmaceutical carrier.

[0678] The foregoing examples are presented herein for illustrative purposes only, and should not be construed as limiting in any way

### EXAMPLES

### Example 1. Allergenic Proteins and Protein Families

[0679] Identification of all known food allergenic proteins in each of the fifteen food sources listed in Table 1 was performed using the name and allergen identification numbers and Genbank numbers as keywords. AllFam allergen Database was used for initial screening. AllFam allergen database hosted by Medical University of Vienna available on the worldwide web at meduniwien.ac.at/allfam/ is a resource for classifying allergens into protein families. The allergenic proteins in the 15 food sources are listed in Table 2.

[0680] Next, all protein families to which allergenic proteins in the 15 food sources belonged were identified and reviewed (Table 2 and Table 3). The allergen database and Genbank were screened to ensure collection of all known allergenic proteins in all known allergenic food sources. Then, protein (amino acid) sequences for: (1) allergenic proteins in Table 2, and (2) all the additional allergenic proteins belonging to each of the identified protein families were retrieved from Genbank and Swiss Prot databases in FASTA format and stored locally. Review of the additional allergenic proteins for each of the identified protein families revealed that these additional allergenic proteins (Table 4) were present in additional food sources (Table 8) that are either known to be allergenic or based on this analysis could be potentially cross-reactive allergenic proteins.

[0681] FIG. 1 shows an exemplary method for the identification of food sources and protein families that contain potentially cross-reactive allergenic proteins.

[0682] Surprisingly, there was very little overlap between allergenic protein families or allergenic proteins between animal food sources and plant food sources. Further, allergenic proteins belonged to a small number of protein families, but each protein family spanned a wide variety of food sources.

[0683] For these studies, amino acid sequences for each protein family were set up in individual datasets. For example, a dataset containing amino acid sequences of Cupin family proteins in a FASTA format was created. Similarly, datasets were created for each of the remaining protein families. Another dataset included amino acid sequences of the allergenic proteins from the 15 food sources of Table 1.

### Example 2. Protein Sequence Homology Search

[0684] Homology between allergenic protein sequences within each identified protein family was evaluated. For this step, full-length amino acid sequences for allergenic proteins within each of the protein families were retrieved from GenBank and SWISS-PROT in FASTA format using FTP transfer protocols. Duplicates, shorter isoforms, and partial sequences were identified and removed from further analyses in this study.

[0685] Homology was determined using one or more bioinformatic steps using full-length protein sequences. Sequence similarity searching is a method of searching sequence databases by using alignment to a query sequence. By statistically assessing how well database and query sequences match one can infer homology and transfer information to the query sequence. BLAST and FASTA algorithms are some of the bioinformatic tools that were used to identify identity and similarity of each amino acid residue in the full-length sequences of allergenic proteins.

[0686] Allergenic proteins within a protein family were compared with other proteins within the same protein family. Pair-wise sequence alignment and multiple sequence alignment of the protein sequences were performed using the program Clustal-Omega for the following protein families: Cupin, Tropomyosin, EF Hand family, Profilin and Bet v 1. Sequence identity and similarity (and thus homology) were determined at the SIAS server using default parameters.

[0687] Pairwise alignments were performed using the k-tuple method in Clustal-Omega, Sampling method: mBed to speed, Matrix: Gonnet PAM 250 matrix; gap open penalty: 6 bits, gap extension: 1 bit. Multiple sequence alignments were produced using the HHalign package, which aligns two profile hidden Markov models (HMM). The guide tree was next constructed using the UPGMA method (Daugelaite et al. (2013) “An Overview of Multiple Sequence Alignments and Cloud Computing in Bioinformatics” International Scholarly Research Notices, vol. 2013, Article ID 615630).

### Example 3. Determination of Cross-Reactivity Score of Allergenic Proteins within a Protein Family

[0688] A cross-reactivity score for allergenic proteins within a protein family was calculated with respect to other or additional allergenic proteins in the same protein family. Cross-reactivity for each protein with respect to a “reference protein” was used to predict the likelihood of cross-reactivity between a protein and its reference protein. The A-RISC cross-reactivity score is believed to be predictive of a cross-reactive allergenic protein's ability to induce an immune response (such as induction of cross-reactive antibodies such as IgE and IgG (e.g., IgG4)) in an individual, a biological sample or a cell. In this Example, a cross-reactivity score for allergenic proteins within the Cupin protein family was calculated with respect to other or additional allergenic proteins within the protein family using the methods described by Chruszcz et al. PLoS ONE 13(11): e208276.

[0689] Briefly, A-RISC cross reactivity score for allergenic protein within the Cupin protein family with respect to other or additional allergenic Cupin protein family members was determined. First, identity and similarity were determined between full-length allergenic proteins in the Cupin protein family as calculated by SIAS server ((Immunomedicine Group: Tools >>SIAS (ucm.es)) using default parameters. Then a cross-reactivity score for each allergenic protein with respect to every other or additional allergenic protein in the Cupin protein family was calculated using the following algorithm: (I+S)/2.

[0690] The SIAS webpage divides amino acids into the following similarity groups: aromatic, aliphatic, positively charged, negatively charged, small with hydroxyl group and neutral polar. Sequence similarities and identities calculated with SIAS were stored and used for the generation of various plots as well as for cross-reactivity score calculations.

[0691] In addition to the Cupin family, cross-reactivity scores for Tropomyosin, EF Hand, Profilin, Bet v 1 protein and profilin families were also determined.

[0692] In each case, the cross-reactivity scores were categorized into 4 levels as shown in Table 9. A-RISC Cross-reactivity scores of ≥0.5-1 (medium high to high likelihood of cross-reactivity with a reference protein) was deemed a minimal cross-reactivity score (medium-high to high) indicative of a cross-reactive allergenic protein.

[0693] Cross-reactivity analyses and correlation were performed for allergenic proteins present in the indicated protein families (including allergenic proteins from food sources not listed on Table 1, for example, from sources listed in Table 8 which also includes certain non-food allergen sources).

[0694] If an allergenic protein in a protein family was found to have at least 70% full-length homology (homology cutoff or minimum acceptable homology) to a reference protein and/or a cross-reactivity score (A-RISC score) of ≥0.5 (cross-reactivity cutoff or cutoff or minimum acceptable cross-reactivity score), then such an allergenic protein was identified as a cross-reactive allergenic protein with respect to its reference protein (and vice versa).

[0695] Allergenic proteins present in Cupin, Bet v 1, Profilin, Tropomyosin and EF Hand protein families were identified (See Table 4) and homology and cross-reactivity was calculated. 2-dimensional matrices illustrating the pair-wise comparison of each allergenic protein within each protein family with respect to other or additional allergenic proteins within the family based on homology and cross-reactivity are shown for the Cupin family (FIG. 4), Tropomyosin family (FIG. 5), Bet v 1 family (FIG. 6), Profilin family (FIG. 7), and EF Hand family (FIG. 8). Larger dots indicate greater homology and cross-reactivity potential.

[0696] Exemplary cross-reactive proteins that belong to the Cupin protein family and have a cross-reactivity score of ≥0.5 with respect to a reference protein are listed in Table 10. Cross-reactive allergenic proteins with a cross-reactivity score of ≥0.7 are predicted to have a high probability of cross-reactivity to the reference protein. Further, it is noted that that cross-reactivity was observed not only between food allergenic proteins but also between food-allergenic proteins and non-food allergenic proteins. Similarly, cross-reactive allergenic proteins in Tropomyosin (Table 11) and Bet v 1 (Table 12) protein families, each having a full-length homology of ≥70% (based on pairwise identity and similarity) and/or cross-reactivity score of ≥0.5 with respect to at least one allergenic protein within the protein family were identified.

[0697] The methods disclosed herein may be used to identify additional allergenic proteins and cross-reactive allergenic proteins.

### Example 4. Determination of T-Cell Epitopes

[0698] Highly immunogenic proteins contain many T-cell epitopes or concentrated clusters of T-cell epitopes within their amino acid sequences, whereas non-immunogenic proteins tend to contain fewer epitopes. Several T-cell epitope-mapping tools are known in the art. For this Example, T-cell epitope mapping was performed using the experimentally-validated T-cell epitope peptides and epitope prediction tools available on the IEDB server available on the world wide web at iedb.org.

[0699] Briefly, all known experimentally-validated T-cell epitopes (approximately 10,000 T-cell epitopes) were first downloaded using the Tepitool available on the world wide web at tools.iedb.org/tepitool from the IEDB database and stored locally for use in this study.

[0700] An in silico library containing approximately 9440 peptides (15-mer amino acid length overlapping peptides with a sliding window of 1 amino acid) was generated from all (37) allergenic proteins present in the Cupin protein family using bioinformatics tools used in the art. The entire dataset of 15-mers was then screened in an unbiased and unsupervised manner against the approximately 10,000 experimentally-validated T-cell epitopes downloaded and stored locally by use of one or more bioinformatics tools. In this Example, the BLAST program with default parameters was used to identify “hits” against experimentally-validated T-cell epitope peptides to identify and map predicted T-cell epitopes on allergenic proteins in the Cupin protein family. A homology cutoff or minimal acceptable homology parameter was set for ≥80% identity and the resulting epitope peptide hits (approximately 7162) were collected and stored locally. Thus, linear T-cell epitopes were determined in this Example for all Cupin family allergenic proteins.

[0701] These approximately 7162 hits were identified as T-cell epitopes based on homology to experimentally-validated T-cell epitopes and include redundant hits arising from the screening of the entire dataset containing 15-mers derived from all 37 Cupin protein family allergenic proteins at the same time in an unbiased and unsupervised manner (data not shown). The 7162 identified T-cell epitopes were then further screened against experimentally-validated epitopes that bind to at least one MHC class II molecule as described below in Example 5.

### Example 5. MHC Class H-Binding Epitope Peptides

[0702] Major histocompatibility complex class II (MHC-II or HLA-II) molecules are expressed on the surface of professional antigen-presenting cells where they display T-cell epitope peptides to T-helper cells in conjunction with MHC-II molecules, which orchestrate the onset and outcome of many host immune responses, including T-cell activation and proliferation, B-cell activation and antibody (e.g., IgG, IgE, etc.) production, etc. The aim of this Example was to identify which of the approximately 7162 in silico predicted T-cell epitopes from allergenic proteins in the Cupin protein family identified in Example 4 would bind to at least one of the MHC-II molecules.

[0703] In this study, the 7162 T-cell epitope hits from the Cupin protein family from Example 4 were in silico tested for predicted binding to at least one of the MHC Class II molecules (HLA-DP, HLA-DM, HLA-DOA, HLA-DOB, HLA-DQ, and HLA-DR and their variants) using prediction tools and algorithms available in the art. This MHC-II binding T-cell epitope screening study was performed on the IEDB server available on the world wide web at tools.iedb.org/mhcii using the default IEDB Recommended 2.20 method. This method uses the Consensus approach, combining NN-align, SMM-align, CombLib and Sturniolo where any corresponding predictor is available for the molecule, otherwise NetMHCIIpan is used. The Consensus method is further described in Wang et al. (2010) BMC Bioinformatics 11:568 and Wang et al. (2008) PLoS Comput Biol. 4(4):e1000048. Homology based on pairwise identify and coverage was used for identification of MHC-II binding epitopes that are highly likely to be present in Cupin proteins. Acceptable minimum homology was set for at least 70% identity and at least 80% coverage over the peptide.

[0704] To classify the 7162 T-cell epitope peptides into binders and non-binders, a binding affinity threshold was selected. A binding affinity threshold of 500 nm Kd in the context of the present disclosure was considered acceptable, thus classifying all T-cell epitope peptides with an IC50 binding affinity ≤500 nm as MHC-II-binders. In this Example, a more stringent binding affinity of IC50 of ≤100 was also selected to identify medium to strong binders for further validation of the ˜7162 T-cell epitopes' binding to one or more of the MHC-II molecules. Approximately 4354 positive experimentally-validated MHC-II-binding epitope hits were obtained using IC₅₀ of ≤100 and stored locally for further use. The resulting ˜4354 hits (again including redundant hits due to presence of multiple redundant T-cell epitope peptide hits from Example 4 in the dataset) are expected to bind to one or more the MHC-II molecules with medium to strong binding affinity.

[0705] The MHC-II binding epitope peptide hits were next used for back-probing or mapping to the full length amino acid sequences of each allergenic protein in the Cupin family using the algorithm BLASTP to confirm the presence, and alignment, of the MHC-II-binding epitopes on each Cupin family allergenic protein. The threshold used was a minimum of 80% identity and 70% coverage of the length of the peptide. The MHC-II-binding epitope peptide hits were mapped to Cupin protein family members in food sources, including food sources other than the 15 food sources listed in Table 1, as well as non-food sources.

[0706] Next, the MHC-II-binding T-cell epitope peptides were mapped in silico to each Cupin family allergenic protein using the BLASTP alignment algorithm. The frequency of MHC-II-binding T-cell epitope peptide hits against each Cupin allergenic protein on the Y-axis and epitope location was mapped along the full-length protein. FIG. 9 shows the epitope cluster map results for each Cupin allergenic protein. The degree of cross-reactivity of each allergenic protein in the Cupin family is provided based on the frequency of hits (labeled on the y-axis for the graphs in FIG. 9 as “Hits2”, similar to the y-axis label in FIGS. 10-11) of MHC-II binding T-cell epitope peptides based on the height of the peaks (number of hits on Y-axis) and the location of MHC-II-binding T-cell epitope peptides along each full-length protein (amino acid position X-axis). Higher peaks reflect a greater frequency of hits for the epitope peptides, and a greater likelihood of the epitope being present on two or more Cupin protein family members, and a greater likelihood of cross-reactivity between them. As can be seen from FIG. 9, the results for ara h 1, a highly allergenic protein present in peanuts showing high frequency of MHC-II-binding T-cell epitope peptide hits, are consistent with those described previously, showing the presence of HLA-II restricted core epitope peptides located from 206-215, 213-225, 353-371, 409-425, 416-427, 436-452, 442-458, 451-470 and 452-470, and 507-524 (Prickett et al. (2013) Clin. & Expt. Allergy 43, 684-697).

[0707] These results are also depicted as circos plots (FIG. 12). The individual MHC-II-binding T-cell epitopes present in a protein are connected to epitopes present on one or more of other proteins within the family. Proteins from some food sources, e.g., coconut had very few hits (data not shown) whereas other proteins had significantly more cross-reactivity with other allergenic proteins within the Cupin family.

[0708] Next, the identified MHC-II binding T-cell epitopes were analyzed to identify cross-reactive MHC-II binding T-cell epitopes. Predicted MHC-II-binding epitopes that were shared by or common to two or more allergenic proteins within the Cupin protein family were identified as cross-reactive peptides. The greater the number of each epitope sequence hits across the allergenic proteins within the protein family, the greater the cross-reactivity between the proteins. As can be seen from Tables 13-18, the presence and location of MHC-II-binding T-cell epitopes on allergenic proteins within a protein family can be identified using the methods of the present disclosure and cross-reactive epitopes.

[0709] MHC-binding T-cell epitopes were identified using the methods described above for the following Cupin proteins: Ber_e_2, Car_i_2, Cor_a_11, Fag_e_1, Fag_e_13S, Fag_t_13S_globulin, Jug_n_4, Lup_a_vicilin, Lup_an_1, Pin_k_2, Pis_s_1, Pis_s_2, Pis_v_2, Pis_v_3, Pis_v_5, Ses_i_3, Ses_i_6, Ses_i_7, Sin_a_2, and Vig_r_2 (See Tables 13-23). Further, these MHC-II-binding T-cell epitopes are cross-reactive with the other proteins within the Cupin protein family, including the peanut allergenic proteins ara h1 and ara h3 with the potential to induce allergy or sensitization in subjects to the food sources containing these cross-reactive allergenic proteins.

[0710] MHC-II or HLA molecules and their variants to which each T-cell epitope peptide bound were also identified based on the experimentally validated T-cell epitopes screened from IEDB. It is significant that these identified MHC-II-binding T-cell epitopes exhibit MHC degeneracy in their binding. The greater the number of MHC-II or HLA-II molecule variants that each T-cell epitope binds, the greater the number of individuals or subjects in which allergen cross-reactivity can be expected to occur, inducing immune response. As seen in FIG. 9, many such epitopes are present in clusters when viewed on the full-length amino acid sequence.

[0711] Results show that the Cupin allergenic proteins have multiple MHC-II-binding T-cell epitopes that bind large numbers of HLA variants ranging from 2-100 HLA molecule variants.

[0712] Further, MHC-II-binding T-cell epitopes may be prioritized based on cross-reactivity within proteins in a protein family. For example, Cupin allergenic proteins can be ranked ordered based on the number of other proteins that share the same epitope and/or the number of MHC molecules bound as found in this Example. A scoring system was used that assigned a cross-reactivity score (different from the score used with full-length proteins). A cross-reactivity scoring algorithm was applied to each identified MHC-binding T-cell epitope to allow rank ordering of the MHC-binding T-cell epitopes. The cross-reactivity score is calculated as:

$$\\ Cross ‐ reactivity score = ( \frac{{\sum }_{i = 1}^{l} h}{l} )$$

where, l is length of peptide (≤15) or number of amino acids in a cross-reactive site (≤15 amino acids), and h=number of times the given amino acid in the cross-reactive sites matches with high-confidence Kmers, given that these Kmers must also be matching with at least one other allergen.

[0713] A cross-reactive site is a region (length ≤15 amino acids) in any allergenic protein sequence that matches (using BLAST) with high-confidence Kmer(s) in such a way that the same given Kmer also matches with another allergen too. The number of redundant high-confidence Kmers that matches (using BLAST) a given region of a protein sequence can be determined. Thus, if a given amino acid is covered by large number of Kmer sequences then h of that amino acid must be large. So a cross-reactivity score of a given cross-reactive site is the sum of h-scores of its amino acids divided by length of the site, i.e., the mean of h-scores.

[0714] Higher cross-reactivity scores are expected to correspond to a higher tendency of an allergenic MHC-II-binding T-cell epitope peptides on one protein to cross-react with other proteins having the same (or nearly identical) epitope. Selection of the epitopes may be made based on other criteria in addition to or instead of the rank ordering done in this Example.

[0715] Tables 13-18 disclose cross-reactive MHC-II-binding epitope peptides identified by the methods disclosed herein for Cupin family proteins. The epitope peptide sequence and the number of distinct other Cupin proteins that each epitope peptide in a Cupin protein “hits” are shown. The various MHC-II molecules (and/or their variants) to which each of the identified cross-reactive MHC-II binding epitope peptides binds is shown in Tables 13-18.

[0716] For example, results show that Jug_r_4 allergenic protein present in English walnuts includes the MHC-II-binding T-cell epitope having the amino acid sequence (5′-HWNLNAHSVVYALRG-3′) corresponding to amino acid sequences from 377 to 391 of the Jug_r_4 protein. This epitope has “hits” to 10 distinct allergenic proteins (Pru_du_6; Gly_m_6; Pis_v_2; Cor_a_9; Jug_n_4; Pis_v_5; Ana_o_2; Car_i_4; Ses_i_7; Ara_h_3) belonging to various food sources (almond, soybean, pistachio, hazelnut, black walnut, cashew, pecan, sesame, and peanut). Thus, the Jug_r_4 protein (or a peptide comprising the epitope) comprising the WIC-II-binding T-cell epitope (5′-HWNLNAHSVVYALRG-3′) is cross-reactive with 10 other Cupin proteins (Pru_du_6; Gly_m_6; Pis_v_2; Cor_a_9; Jug_n_4; Pis_v_5; Ana_o_2; Car_i_4; Ses_i_7; and Ara_h_3 proteins), and peptides comprising sequences corresponding to the Jug_r_4 MHC-II-binding T-cell epitope (5′-HWNLNAHSVVYALRG-3′).

[0717] Further, the WIC-II-binding T-cell epitope (5′-HWNLNAHSVVYALRG-3′) is expected to bind to 25 different MHC-II molecules/variants in subjects having any of the following HLA haplotypes: HLA-DQA1*01:02/DQB1*06:02;HLA-DRB3*02:02;HLA-DRB1*13:02;HLA-DQA1*05:01/DQB1*03:01;HLA-DRB1*07:01;HLA-DRB1*09:01;HLA-DQA1*04:01/DQB1*04:02;HLA-DQA1*03:01/DQB1*03:02;HLA-DRB1*01:01;HLA-DRB3*01:01;HLA-DQA1*01:01/DQB1*05:01;HLA-DRB1*15:01;HLA-DRB1*04:01;HLA-DRB1*12:01;HLA-DRB1*08:02;HLA-DRB1*04:05;HLA-DQA1*05:01/DQB1*02:01;HLA-DRB4*01:01;HLA-DRB5*01:01;HLA-DRB1*11:01;HLA-DPA1*01:03/DPB1*02:01;HLA-DRB1*03:01;HLA-DPA1*03:01/DPB1*04:02;HLA-DPA1*02:01/DPB1*01:01;HLA-DPA1*02:01/DPB1*05:01.

[0718] The presence, location, and frequency of cross-reactive MHC-II-binding T-cell epitope hits can be determined for each allergenic protein present in the other identified protein families provided in Tables 3-4.

[0719] Similar methods were carried out for the Tropomyosin and Bet v 1 protein families, with results shown in Tables 20 and 22.

### Example 6. Identification of Cross-Reactive B-Cell Epitopes

[0720] B-cell epitopes can be linear epitopes or conformational (discontinuous). However, IgE-binding B-cell epitopes from food allergens are typically linear B-cell epitopes. In this Example, linear B-cell epitopes located in the allergenic proteins present in the Cupin protein family were identified. Briefly, all known experimentally-validated B-cell epitopes were first downloaded from the IEDB database available on the world wide web at iedb.org, and stored locally for use in this study (see tools.immuneepitope.org/main/html/bcell tools.html available on the world wide web).

[0721] A set of peptides (15-mer amino acid length overlapping peptides with a sliding window of 1 amino acid) were generated in silico from 37 protein family member sequences present within the Cupin protein family. The entire dataset of 15-mers was then screened in an unbiased and unsupervised manner against the experimentally-validated B-cell epitopes that were downloaded from IEDB database and stored locally. In this study, BLASTP algorithm with default parameters was used to screen for “hits” against the experimentally-validated B-cell epitope peptides. Cupin 15-mers that had a minimal acceptable homology of >80% identity and >70% coverage over the peptide length with a validated B-cell epitope were identified and stored locally in an in silico library. Approximately 2636 hits were identified as B-cell epitopes from the screening of the entire dataset containing 15-mers derived from all 37 Cupin protein family allergenic proteins at the same time in an unbiased and unsupervised manner.

[0722] Next, cross-reactivity of each identified B-cell epitope in the in silico library was determined. In order for an identified B-cell epitope to be characterized as a cross-reactive B-cell epitope, the B-cell cell epitope needs to present on at least 2 distinct full-length Cupin proteins. Accordingly, the approximately 2636 identified B-cell epitopes were each mapped back to the individual full length Cupin proteins as described above in Example 5. BLASTP algorithm was used for alignment of the peptide sequences. The B-cell epitope peptide sequence, and the number of Cupin proteins on which each B-cell epitope was present are provided in Table 19. Data shows that certain B-cell epitopes were shared by as many as 11 Cupin proteins. For example, Ana_o_2 B-cell epitope peptide: DNGIEETICTMRLK corresponding to 269-283 amino acid on the Ana_o_2 protein is highly cross-reactive with Sin_a_2; Ses_i_6; Jug_r_4; Gly_m_6; Pis_v_5; Pis_v_2; Car_i_4; Jug_n_4; Cor_a_9; Ses_i_7; Pru_du_6.

[0723] A comparison of the identified cross-reactive MHC-II-binding T-cell epitopes of Example 5 and the identified cross-reactive B-cells epitopes was performed by alignment (BLAST algorithm) of the B-cell epitopes with the MHC-II-binding T-cell epitopes to identify the cross-reactive epitope peptide sequences that included both T-cell epitopes and B-cell epitopes, thus identifying any overlap or adjacency of T-cells epitopes and B-cells epitopes on the Cupin allergenic proteins. Of the approximately 2636 B-cell epitopes, 1225 epitopes included both MHC-II-binding T-cell and B-cell epitope sequences.

[0724] Similar methods were carried out for the Tropomyosin and Bet v 1 protein families, with results shown in Tables 21 and 23.

### Example 7. Method of Obtaining Structural Models of Cross-Reactive Allergenic Proteins and/or Reference Allergenic Proteins and Prediction of Surface Exposed Amino Acids

[0725] The MHC-II-binding T-cell epitope peptides are supplemented with additional T-cell epitopes. To obtain a structural model of an allergenic protein (e.g., a cross-reactive allergenic protein) multiple structural representatives of the allergenic protein are retrieved from NCBI NR database and aligned. From the alignment a profile Hidden Markov Model is generated using the program HMMer3. The HMM is used to detect homologous structures in the PDB with a minimum e-value of 1×10⁻³. The HMM is used to align the structures' sequence to a reference sequence. An expected minimum threshold of 30% identity between at least one member of the allergenic protein or a T-cell epitope thereof is set to assert sufficient homology. No more than 10% insertions/deletions in the local alignment region are permitted. Predicting surface exposure of amino acids from protein sequence of the cross-reactive allergenic protein is performed using the method described in Holbrook et al. (1990) Protein Eng. 1990, 3(8):659-65).

### Example 8. In Vitro Assay for MHC-II Binding of T-Cell Epitopes

[0726] Peptides, for example, MHC-II-binding T-cell epitopes identified in Examples 1-5, are assayed for in vitro MHC-II binding. A competitive MHC Class II molecule-binding assay is used, wherein each peptide is analyzed for its ability to displace a known control binder from each of the human MHC Class II HLA-DP, HLA-DM, HLA-DOA, HLA-DOB, HLA-DQ, and HLA-DR. The MHC-II molecule and control peptides, for example with MHC Class II HLA-DRB1* allotypes (covering in total about 63% of the allotypes found in Caucasian population) are used in this Example. Each of the identified MHC-II-binding T-cell epitope peptides derived from Cupin, Tropomyosin, or Bet v 2 protein families are analyzed in a competition assay and screened for relative binding compared to a control peptide under stringent and less stringent conditions. Solubility of the identified MHC-II-binding T-cell epitope peptides is an essential criterion for development as a therapeutic or diagnostic. Each of the peptides is prescreened for solubility in aqueous, acidic milieu. Due to the nature of the competitive assay, the data for each are presented as a ratio of its own IC50 to that of the control peptide. Lower affinity binders, medium affinity binders and high affinity binders to the MHC-II molecules are determined and ranked. Each epitope's ability to bind the maximum number of MHC-II molecules is determined and ranked for “pan” MHC-II phenotype.

### Example 9. T-Cell Proliferation Assays

[0727] T-cell proliferation assays are conducted with full-length allergenic proteins (for example, shown in Tables 10-12) or allergenic peptides (for example, shown in Tables 13-18, 20, and 22). For example, in one experiment (A), six distinct allergenic proteins from Table 2 are selected (for example, ara_1, ara_h_3, car_i_2, car_i_4, Jug_n_1 and Jug_r_4 full-length protein) digested in simulated gastric juices (with enzymes) and immobilized on a microarray bead. In another experiment (B), five cross-reactive MHC-II-binding peptides from 6 distinct Cupin allergenic proteins shown in from Tables 13-18, 20, and 22 are immobilized on a microarray bead. Peptide microarrays are prepared using a commercial microarray system such as PEPperCHIP® Custom Peptide Microarrays as described by Ehlers et al. Clin. Exp. Allergy. Vol. 50(12), December 2020, 1415-1423.

[0728] Biological samples (blood) from subjects having an allergy to at least one of the allergens (for example, peanut, pecan and black walnut, or English walnut) are obtained and PBMCs are cultured in RPMI-1640 containing 2 mM L-glutamine, 100 IU/mL, penicillin-streptomycin and 5% heat-inactivated human AB serum (Sigma). The PBMCs are contacted with the microarray with (A) the allergenic proteins, and the microarray with (B) the MHC-II-binding peptides.

[0729] Antigen-induced T-cell proliferation is assessed by 3H-Thymidine (3H-TdR) uptake assays as described in J. Allergy Clin Immunol 2011, 127:608-615, e1-5. A stimulation Index (SI; cpm antigen-stimulated T-cells/cpm unstimulated T-cells)≥2 is considered positive. HLA-II restriction of epitope recognition by T-cells is assessed using monoclonal antibodies directed against HLA-DR (L243), HLA-DQ (SVP-L3), HLA-DP (B7/21) to block epitope presentation. To allow detection of peptide-induced CD4+ T-cell proliferation within whole PBMC, 7-day cultures of CFSE-labeled PBMC are set up. At least 10,000 CD4+ T-cells are analyzed per sample and SI calculated as percentage of CD4+CFSElo (proliferated) cells with antigen (background). Expression of markers for T-regs or suppressor T-cells (such as Foxp3+ and others) are performed to identify the T-cell type. The detection threshold for a specific response in this assay is assessed by expanding peptide-specific T-cells from proliferated CD4+ cells and Foxp3+ cells over a range of SI values. Specific T-cells are generated from divided T-cells with SI from 3 experiments.

### Example 10. Basophil Activation Assays

[0730] Basophils play a key role in allergy. Upon specific recognition of allergens by surface IgE, basophils release potent mediators, accompanied by mechanistically distinct surface expression of activation markers CD63 and CD203c. The DURAClone IF Basophil Activation panel assesses CD63 and CD203c, indicating IgE-mediated activation. DURAClone IF Basophil Activation assay from Beckman coulter is used in accordance with manufacturer's instructions to determine activation of basophils present in a biological sample (e.g., PBMCs) in response to cross-reactive allergenic proteins or MHC-II-binding T-cell epitope peptides (for example, those identified in Examples 1-5).

### Example 11. Microarray Assay for Detection of IgE Antibody and IgG Antibody

[0731] MHC-II binding T-cell peptides obtained from Example 5 are used to prepare a peptide microarray using a commercial microarray system such as PEPperCHIP® Custom Peptide Microarrays as described by Ehlers et al. (2020) Clin. Exp. Allergy. Vol. 50(12), 1415-1423.

[0732] The following sets of 5 exemplary MHC-II binding T-cell epitope peptides from 7 allergenic proteins may be used in the array. The peptide epitopes' corresponding amino acid position on the full-length proteins is provided.

[0733] Walnut Jug_r_4 MHC-II binding Epitope Peptides: HWNLNAHSVVYALRG (aa 377-391 aa), VPHWNLNAHSVVYAL (aa 375-389 aa), HTLPVLRWLQLSAER (aa 351-aa 365), DIIAFPAGVAHWSYN (aa 145-aa157), LLLPQYSNAPQLVYI (aa 83-97 aa).

[0734] Pecan Car_i_4 MHC-II binding Epitope Peptides: HWNLNAHSVVYALRG (aa 378-392 aa), AGVAHWCYNDGSSPV (aa 152-166 aa), NLPILRWLQLSAERG (aa 354-367 aa), DIIAFPAGVAHWCYN (aa 146-159 aa), PAGVAHWCYNDGSSP (aa 151-165 aa).

[0735] Hazelnut Cor_a_9 MHC-II binding Epitope Peptides: PHWNLNAHSVVYAIR (aa 382-395 aa), EGDIIALPAGVAHWC (aa 151-166 aa), LPAGVAHWCYNDGDS (aa 157-172 aa), LLLPQYSNAPELIYI (aa 85-99 aa), HFREGDIIALPAGVA (aa 148-162 aa), AGRTSAIRALPDDVL (aa 455-469 aa)

[0736] Mung Bean Vig_r_2 MHC-II binding Epitope Peptides: FGINAENNQRNFLAG (aa 379-393 aa), GSLLLPHYNSKAIVI (aa 300-314 aa), GINAENNQRNFLAGE (aa 380-394), SLLLPHYNSKAIVIL (aa 301-315 aa), QRNFLAGEKDNVISE (aa 387-400 aa)

[0737] Peanut Ara_h_3 MHC-II binding Epitope Peptides: HYNTNAHSIIYALRG (aa 407-418 aa), LLILRWLGLSAEYGN (aa 383-395 aa); GHVLVVPQNFAVAGK (aa 443-455 aa); AHSIIYALRGRAHVQ (aa 412-424 aa); ALRGRAHVQVVDSNG (aa 418-431 aa)

[0738] Cashew Ana_o_2 MHC-II binding Epitope Peptides: PAGVAHWCYNEGNSP (aa 138-152 aa); PHWNLNSHSIIYGCK (aa 332-346 aa); GDIIAIPAGVAHWCY (aa 132-146 aa); LLLPQYSNAPQLIYV (aa 72-86 aa); NGIEETICTMRLKEN (aa 270-282 aa)

[0739] Common Buckwheat Fag_e_1 MHC-II binding Epitope Peptides: RINTVNSNNLPILEF (aa 406-420 aa); QILVVPQGFAVVLKA (476 aa-488 aa); PRAGRINTVNSNNLP (402 aa-416 aa); TSVLRAIPVEVLANS (515 aa-529 aa); TKLILSFSLCLMVLS (2 aa-16 aa)

[0740] Briefly, a microarray with synthetic 15-mer peptides among those listed above is commercially obtained (PEPperPRINT). The peptide length of 15-20 amino acids is in accordance with the experience of PEPperPRINT to provide sufficient sensitivity without significant formation of secondary structures. All peptides are printed in triplicates with a linker consisting of 2 ß-alanine and one aspartic acid. This linker is chosen to circumvent the binding of negatively charged fluorescent dyes to positively charged amino acids which are close to the array surface. Subjects' sera are diluted 1:4 in WSUB and incubated overnight.

[0741] For detecting bound-specific IgE and IgG4, a biotinylated anti-IgE antibody (clone MHE-18 1:5000, BioLegend) and simultaneously a biotinylated anti-human IgG4 coupled with Neutravidin DyLight 680 (clone HP6025, 1:5000, Southern Biotech/Thermo Fisher Scientific) is applied on the microarray and incubated for one hour at room temperature. Bound biotinylated human anti-IgE antibodies is visualized by adding Neutravidin DyLight 800 (1:5000, Thermo Fisher) for one hour at room temperature. After extensive washing and drying, the microarray slides are scanned at a wavelength of 700 nm for IgG4 and 800 nm for IgE (intensity: 8.5) and the focus is set to 0.8 mm and the resolution to 21 μm.

[0742] For data evaluation, the fluorescent signals for each peptide are obtained using the Pepslide Analyzer Software (SICASYS) with the fixed-spot adjustment and the logarithmic signal-to-noise ratios (S) is computed as described by Ehlers et al. Epitopes are defined as recognition of 2-4 contiguous peptides with a median z-score ≥3.0 and the amino acid residues will be counted based on the amino acid sequence without signal peptide.

### Example 12. T-Cell Epitope Peptide-Specific T-Cells

[0743] 9-mer and 15-mer peptides comprising MHC-II binding epitopes are synthesized using a standard solid phase synthesis method and purified by reversed phase high performance liquid chromatography (HPLC). The purity (>90%) and the identity of the peptides are determined by analytical HPLC and mass spectrometry analysis, respectively. Peptides are dissolved in dimethylsulfoxide at 20 mg/ml and stored at −80° C.

[0744] HLA-II restricted cell lines are purchased from International Histocompatibility Working Group and American Type Culture Collection (Rockville, Md.) and are cultured under the recommendations of their respective depositors.

[0745] Human leukocyte antigen (HLA)-transfected C1R cells are used as stimulator cells. cDNA encoding an open reading frame of HLA class II (HLA-DRB3*02:02; HLA-DRB1*13:02;HLA-DRB1*07:01; or HLA-DRB1*09:01) is amplified by PCR and inserted into an expression vector. C1R cells are transfected with HLA class II expression vector and cultured in presence of G418 (Invitrogen, Carlsbad, Calif) for 14 days. G418-resistant single cell and feeder cells were plated into 96 well cell culture plate (Corning, Inc., Corning, N.Y.) containing culture medium supplemented with G418 and further cultured for 30 days. The expression of transfected HLA class II on the C1R cells was confirmed by flow cytometry analysis.

[0746] Monocyte-derived dendritic cells (DCs) are used as antigen-presenting cells to induce cytotoxic T lymphocyte (CTL) which respond against peptide presented on HLA class II. DCs are generated in vitro (Uchida N et al. Clin Cancer Res. 2004; 10:8577-86). Peripheral blood mononuclear cells (PBMCs) are isolated from blood of healthy volunteer by Ficoll-Paque PLUS (GE Healthcare). Monocytes (adherent cells in PBMCs) are cultured to induce into DCs in the presence of 1000 IU/ml of granulocyte-macrophage colony-stimulating factor (R&D Systems, Minneapolis, Minn.) and 1000 IU/ml of interleukin (IL)-4 (R&D System) in AIM-V Medium (Invitrogen) containing 2% heat-inactivated human serum (AIM-V/2% HS medium). After seven days of culture, monocyte-derived DCs are pulsed with 20 μg/ml of the synthesized peptide in the presence of 3 μg/ml of β-2-microglobulin for 3 hr at 37° C. in AIM-V Medium. These peptide-pulsed DCs are inactivated by X ray-irradiation (20 Gy) and mixed at a 1:20 ratio with autologous CD8+ T cells obtained from PBMCs by using CD8 Positive Isolation Kit (Thermo Fisher Scientific, Carlsbad, Calif). These cultures are set up in 48 well cell culture plate (Corning). Each well contain 1.5×104 peptide-pulsed DCs, 3×105 CD8+ T cells and 10 ng/ml of IL-7 (R&D System) in 0.5 ml of AIM-V/2% HS medium. The day after next (day 2), IL-2 (Novartis) is added to the culture at final concentration of 20 IU/ml. On day 7 and day 14, CD8+ T cells are further stimulated with autologous peptide-pulsed DCs. DCs are prepared each time in the same way as described above. Peptide specific IFN-γ production of CD8+ T cells is tested by ELISPOT assay on day 21 (Watanabe T et al. Cancer Sci. 2005; 96:498-506; Suda et al. Cancer Sci. 2006; 97:411-9; incorporated by reference in their entireties).

[0747] After limiting dilution, CD8+ T cells are expanded using the Rapid Expansion Method. CD8+ T cells are cultured with feeder cells (5×106 cells each) and 40 ng/ml of anti-CD3 antibody in 25 ml of AIM-V/5% HS medium. Next day (day 1), 3000 IU of IL-2 are added to the culture. The half volume of culture medium is exchanged with fresh AIM-V/5% HS medium containing 60 IU/ml of IL-2 on day 5, 8 and 11. Peptide specific IFN-γ production of CD8+ T cells was tested by ELISA between day 14 and day 16.

[0748] To examine peptide specific IFN-γ production of CD8+ T cells, ELISPOT assay or ELISA are performed. Peptide-pulsed HLA class II expressing C1R cells (1×104 cells) are prepared as stimulator cells. CD8+ T cells are used as responder cells. IFN-γ ELISPOT assay and IFN-gamma ELISA are performed under the manufacturer's procedure (BD Biosciences, Calif.).

[0749] TCR sequences are determined (Fang H et al. Oncoimmunology. 2015; 3:e968467). Total RNA is extracted from expanded or dextramer-positive T cells. cDNAs with common 5′-RACE adapter are synthesized using SMART library construction kit (Clontech, Mountain View, Calif). The fusion PCR is performed to amplify TCRA or TCRB cDNAs using a forward primer corresponding to the SMART adapter sequence and reverse primers corresponding to the constant region of each of TCRA or TCRB. After adding the Illumina index sequences with barcode using the Nextera Index kit (Illumina, San Diego, Calif.), the prepared libraries are sequenced by 300-bp paired-end reads on the MiSeq (Illumina). Obtained sequence reads are analyzed using Tcrip software. The sequence is also confirmed by Sanger sequence using fusion PCR products as a template (Thermo Scientific).

[0750] Both TCRA and TCRB sequences are codon-optimized and cloned into pMP71-PRE; incorporated by reference in their entireties). To maximize TCR expression, modified murine TCRA and TCRB constant domains are used. Transient retroviral supernatants are generated and PBMCs from donors are transduced. The expression of the TCR is evaluated with anti-human TCRβV antibodies. Only transduced TCR-engineered T cells are transduced using the staining with APC-conjugated anti-mouse TCRf3 monoclonal antibody (H57-597, eBioscience, San Diego, Calif) at a proper condition for TCR-engineered T cells for FOXM1 and UBE2T followed by the incubation with anti-APC microbeads (Miltenyi Biotec, Bergisch Gladbach, Germany) according to the manufacturer's instructions. To increase the number of T cells transduced with desired TCRs which are not occupied with antibodies, conditions are based on the peak fluorescence intensity and the number of sorted cells by comparing the five different conditions of antibody dilution. 1:2000 (0.1 μg/mL) to 1:4000 (0.05 μg/mL) ratios of antibody staining is used for sorting of TCR-engineered T cells for FOXM1 and UBE2T.

[0751] CTL clones are induced that are specific to HLA-DRB3*02:02; HLA-DRB1*13:02; HLA-DRB1*07:01; or HLA-DRB1*09:01 restricted peptides. The CTLs are captured with HLA dextramer with each peptide, and TCR sequences for these cells are determined. Using the HLA expressing cells with or without peptide, all CTL clones are evaluated for peptide specific IFN-γ production by ELISA assays.

### Example 13. Vaccine

[0752] The Examples above identified, for example, allergenic proteins ara h1 and ara h 3 present in peanuts and cross-reactive allergenic protein ber e 2 present in brazil nuts and cross-reactive epitopes (MHC-binding T-cell epitopes) located on ara h1, ara h 3, and ber e 2 (see Tables 13-23).

[0753] A library containing all cross-reactive MHC-II binding epitopes shared by or common to ara h1, ara h3 and ber e 2 are expressed by mammalian, phage, hyperphage, or yeast display. Epitope that bind to broadly neutralizing epitopes are selected. Additional rounds are further condcuted in the presence of heat, intercalating agents and other protein folding selective pressures to evaluate diversity. A final set of 100 cross-reactive epitopes exhibiting maximal epitope dispersion (most different from one another) are selected. The set of 100 members are then expressed and tested for folding and binding to broadly neutralizing antibodies in a terminal expression system for production. A population of epitopes are purified without His or other tags using broadly neutralizing antibody affinity columns, beads, etc. The resulting pure pools are combined into a single ventivalent (20×), quinquavalent (50×), and centivalent (100×) pools composed of equal composition of each antigen. The performance of the vaccine is validated using FACS and an animal model.

[0754] For FACS, a population of cells containing known broadly neutralizing antibodies (a library of antibodies with spike in broadly neutralizing B-cells, or a population of B-cells from an individual known to carry broadly neutralizing B-cells) is sorted using a plurality of labeled cross-reactive epitopes as a detection agent.

[0755] Animal models (mice, ferrets, primates, or human) are provided either a single allergen, a multi-allergen, or a saline/adjuvant control. Multivalent doses are made such that individual peptides are below the minimum concentration required for an effective immune response. Animals are subjected to cross-reactive allergen challenge against peanut allergens ara h1 and ara h3 and brazil nut allergen ber e 1 or whole/complete peanut and brazil nut. Responses are assays by ELISA, FACS and high throughput sequencing of the BCR and TCR responding populations.

### Example 14. Prevention and Suppression of Food Allergy With Food Allergen-Derived Cross-Reactive Peptides

[0756] Multiple food allergy is being more and more commonly observed in subjects. Subjects presenting with allergies to two or more foods, such as English or Persian walnut, black walnut, pecans, pistachio, peanuts, almonds, sesame, cashew, hazelnut, and soybean are recruited.

[0757] Suitable peptides for use in subjects are selected based on cross-reactivity of peptides. Peptides having a minimal acceptable homology (at least 70% identity over 80% coverage) to MHC-II-binding T-cell epitopes are also acceptable for use in such treatment. For example, peptides comprising MHC-II-binding T-cell epitopes that a present on at least 2 distinct allergenic proteins are selected. For example, use of the methods of the present disclosure (for example, as described in Examples 1-5) identified a cross-reactive peptide that includes an MHC-II-binding T-cell epitope (amino acid sequence 5′-HWNLNAHSVVYALRG-3′) derived from English walnut as cross-reactive with 10 additional allergenic proteins within the Cupin protein family from various food sources (Pru_du_6 (almond), gly m 6 (soybean), Pis_v_2 (pistachio), Pis_v_5 (pistachio), Cor_a_9 (hazelnut), Jug_n_4 (black walnut), Ana_o_2 (cashew), Car_i_4 (pecan), Ses_i_7 (sesame), and Ara_h_3 (peanut)) (Tables 13-18, 20, and 22).

[0758] The cross-reactive peptide having the amino acid sequence 5′-HWNLNAHSVVYALRG-3′ corresponding to: amino residues 377 to 388 on the walnut (Juglans regia) allergenic protein Jug_r_4 and containing an MHC-II-binding T-cell epitope, amino acid residues 378-389 on the pecan (Carya illinoinensis) allergenic protein Car_1_4; 380-391 on the black walnut (Juglans nigra) Jug_n_4, and to amino acid residues 382-393 on the hazelnut (Coryllus avellane) allergenic protein Cor_a_9 (wherein the MHC-II-binding T-cell peptide epitope on Cor_a_9 has the amino acid sequence of HWNLNAHSVVYAIR having an extremely high homology to peptide sequences of Jug_r_4, Car_i_4, and Jug_n_4 with a single amino acid difference) is selected.

[0759] Mouse Study: A composition comprising 50 ug of the cross-reactive peptide comprising the MHC-II-binding T-cell epitope 5′-HWNLNAHSVVYALRG-3′ and a pharmaceutical acceptable carrier is administered orally to mice for 4 weeks. Two weeks after the last dose, blood is drawn from a peripheral vein and CD4+ T cells are purified by cell sorting on magnetic beads. CD4+ T-cells are added to culture medium in which histocompatible dendritic cells, used as antigen presenting cells, are incubated with either the peptide sequence or with tetanus toxoid as a control for 2 hr at room temperature. The cells are then washed and purified CD4+ T-cells are added to culture medium. Such CD4+ T-cells induce apoptosis of dendritic cells presenting the Cor_i_9 antigen, but not of dendritic cells presenting the tetanus toxoid protein. Incubation of CD4+ T-cells with dendritic cells loaded with the hazelnut Cor_i_9 antigen results in dendritic cell apoptosis.

[0760] Single Allergen Subcutaneous Immunotherapy: The cross-reactive peptide comprising the Jug_r_4 MHC-II-binding T-cell epitope 5′-HWNLNAHSVVYALRG-3′ is prepared for single allergen oral immunotherapy. Subjects presenting allergic reactions upon exposure to walnut and hazelnut food antigens by ingestion of walnuts and hazelnuts are treated with subcutaneous immunotherapy with a polypeptide comprising the Jug_r_4 5′-HWNLNAHSVVYALRG-3′ and are expected to subsequently fail to react to both walnuts and hazelnuts.

[0761] Multiple Allergen Oral Immunotherapy: Subjects presenting allergic reactions upon exposure to peanuts and a suspected allergy to one or more of the food allergens: almond, soybean, pistachio, hazelnut, English walnut, black walnut, cashew, pecan, sesame, and peanut are identified and administered multiple allergen oral immunotherapeutic compositions comprising equal measures proteins or peptides including of each of the MHC-II-binding epitope peptides: 5′-HWNLNAHSVVYALRG-3′ (present in English walnut, pecan, and black walnut); 5′-HWNLNAHSVVYAIRG-3′ present in hazelnuts (Cor_a_9); 5′-HWNFNAHSIVYGCKG-3 present in pistachio (Pis_v_5); 5′-HWNLNAHSIIYITRG-3′ present in sesame (Ses_i_7); and 5′-GALLLPHFNSKAIVI-3′ present in soy (Gly_m_5).

[0762] Vaccine: Vaccination with a composition containing the MHC-II-binding T-cell epitope peptides in Table 24 modified to contain a redox moiety is expected to elicit cytolytic regulatory T-cells that reduce or eliminate the symptoms related to walnuts and those resulting from ingestion of at least one of the food sources containing cross-reactive allergenic proteins Pru_du_6 (almond), gly m 6 (soybean), Pis_v_2 (pistachio), Pis_v_5 (pistachio), Cor_a_9 (hazelnut), Jug_n_4 (black walnut), Ana_o_2 (cashew), Car_i_4 (pecan), Ses_i_7 (sesame), and Ara_h_3 (peanut).

### Example 15. Method for Identifying Allergen-Specific B Cells

[0763] Labeling Cross-reactive B-cell epitope: Recombinant peptide comprising a cross-reactive B-cell epitope (e.g., on peanut Ara h 3 and cashew Ana_o_2) identified in Example 6 above is biotinylated at lysine residues using a water-soluble biotin-XX sulfosuccinimidyl ester according to the manufacturer's protocol (Invitrogen/Thermo Fisher Scientific, CA) to produce a labelled polypeptide comprising the B-cell epitope peptide. Fluorescent multimers are formed by means of the stepwise addition of Alexa Fluor 488 streptavidin (Invitrogen) to the biotinylated allergen until a 1:4 molar ratio is reached, thereby fluorescently labelling the allergen.

[0764] Identifying Allergen-Positive Circulating B Cells from Subjects: The identification of cross-reactive allergenic protein (or polypeptide)-positive circulating B cells from subjects is carried out as previously described (Patil, S. U. et al. (2015) J. Allergy Clin. Immunol. 136(1): 125-134). Briefly, PBMCs are isolated by density gradient centrifugation (Ficoll-Paque Plus; GE Healthcare) from peripheral blood harvested from a subject. The PBMCs are stained with CD3-allophycocyanin (APC; clone OKT3; eBioscience), CD14-APC (clone 61D3, eBioscience), CD16-APC (clone CB16, eBioscience), CD19-APC-Cy7 (clone SJ25C1; BD Biosciences), CD27-phycoerythrin (clone M-T271; BD PharMingen), CD38-Violet 421 (clone HIT2, BD Biosciences), IgM-phycoerythrin-Cy5 (clone G20-127; BD PharMingen), and fluorescently-labelled allergen (e.g., Alexa Fluor 488-Ara h 3 multimer). Alexa Fluor 488⁺ B cells (allergen-positive B cells) are then identified and isolated from the rest of the stained PBMC population by flow cytometry using a FACS AriaIII instrument. Data is analyzed with FlowJo 8.8.7 software. Normalization of Alexa Fluor 488 is performed with Quantum Alexa Fluor 488 Molecules of Equivalent Soluble Fluorochrome (MESF) Beads (Bangs Laboratories). Single allergen-positive CD1913 cells, identified by FACS analysis, are sorted into individual wells of a 96 well plate (Eppendorf) containing 10 μL of first-strand buffer (Invitrogen) and 20 Units of recombinant RNasin Ribonuclease Inhibitor (Promega), and are frozen at −80° C.

[0765] Single-Cell RT-PCR and Immunoglobulin Gene Amplification: Immunoglobulin genes are amplified from the frozen B cells using a nested RT-PCR protocol as follows: 3 μL of NP40 and 150 ng of random hexamers are added to each well containing the frozen B cells, and the cells are lysed by heat treating the samples at 65° C. for 10 minutes, 25° C. for 3 minutes, and then a 4° C. incubation. The lysed cells are then subjected to a reverse transcription reaction using first-strand buffer (Invitrogen), 0.1 mM dithiothreitol (Invitrogen), 2.5 mM deoxynucleotide triphosphates (Invitrogen) and SuperScript III Reverse Transcriptase (Invitrogen) according to the manufacturer's protocol. The resulting cDNA is then amplified by two rounds of nested PCR amplification. In the first round, 5 μL of template cDNA is amplified with Taq DNA polymerase (Invitrogen) according to the manufacturer's protocol. In the second round, 3 μL of the Taq-amplified template is amplified with Pfu DNA polymerase (Invitrogen) according to the manufacturer's protocol. A sample taken from the amplification products of the second PCR step is run on a 1.5% agarose gel to determine whether immunoglobulin heavy and light chains are successfully/adequately amplified. Successfully amplified products are then sequenced.

[0766] Recombinant Antibody Production: Paired immunoglobulin heavy and light chains are selected after sequencing, and the DNA encoding the selected heavy and light chains (amplified in the second nested PCR step) is purified with the QIAquick 96 PCR Purification Kit (Qiagen). NEB® 5-alpha competent E. coli (New England Biolabs) are transformed with the heavy and light chain ligation products at 42° C. for 30 seconds, grown for 1.5 hours at 37° C., followed by selection on LB plates with 100 μg/mL ampicillin. Ampicillin-resistant clones are selected and screened for vector insertion of the amplified immunoglobulin heavy and light chains. Vectors harboring the insertions are then amplified and purified from overnight liquid cultures (LB with 100 μg/mL ampicillin) of selected colonies using the QIAprep Spin Miniprep Kit (Qiagen). Plasmid DNA is then sequenced with colony PCR primers to determine similarity to previous sequences. Plasmid DNA (25 ng) from selected heavy and light chains are transfected into HEK293T cells using GenJet In Vitro DNA Transfection Reagent (SignaGen, Rockville, Md.) according to the manufacturer's protocol. Antibodies are purified from the transfected HEK293T cells according to standard techniques.

[0767] Recombinant Antibody Characterization: Allergen specificity is then validated by ELISA assay (ImmunoCAP) for the recombinant antibodies purified from the transfected HEK293T cells according to the manufacturer's protocol. For immunoblot inhibition experiments, recombinant cross-reactive proteins (e.g., Jug_r_4, Ara_h_1, Ara_h_3, Car_i_4, Jug_n_4, Cor_a_9) are loaded onto a gel at concentration of 2-3 μg of protein or peptides thereof/cm of gel, Immunoblotting experiments are then performed as is well-known in the art using the recombinant antibodies developed using the methods described above. Membranes are then incubated with fluorescent or radiolabeled goat anti-human IgE and exposed to Kodak Imaging film for 12 days or through fluorescent microscopy or other fluorescence detection systems. A pool of subjects' sera is preabsorbed with cross-reactive proteins (e.g., Jug_r_4, Ara_h_1, Ara_h_3, Car_i_4, Jug_n_4, Cor_a_9) and whole peanut flour protein extract as control.

### Example 16. Peptides for Antibody Preparation

[0768] Synthesis of cross-reactive allergenic peptide haptens: 0.5 g of p-carboxybenzaldehyde is dissolved in 10 ml of water, 3 ml of HCl solution with a concentration of 1 mol/L is added to obtain a mixed solution 1; and DMF and 1.02 g of MHC-II-binding peptides of Cupin allergenic proteins provided below are added to the mixed solution while magnetically stirring, and then the mixed solution is stirred magnetically at 60° C. and refluxed overnight to obtain a mixed solution 2; the obtained mixed solution 2 is centrifuged, washed and dried to obtain a crude product; and column chromatography separation is carried out on the crude product to obtain the Cupin allergenic cross-reactive epitope-haptens.

[0769] Walnut Jug_r_4 Peptides: HWNLNAHSVVYALR (aa 377-388 aa), VPHWNLNAHSVVYA (aa 375-389 aa), HTLPVLRWLQLSAE (aa 351-aa 365), DIIAFPAGVAHWSY (aa 145-aa157), LLLPQYSNAPQLVY (aa 83-97 aa).

[0770] Pecan Car_i_4 Peptides: HWNLNAHSVVYALR (aa 378-389 aa), AGVAHWCYNDGSSP (aa 152-166 aa), LPILRWLQLSAERG (aa 354-366 aa), DIIAFPAGVAHWCY (aa 146-159 aa), PAGVAHWCYNDGSS (aa 151-165 aa).

[0771] Hazelnut Cor_a_9 Peptides: HWNLNAHSVVYAIR (aa 382-393 aa), GDIIALPAGVAHWC (aa 152-166 aa), PAGVAHWCYNDGDS (aa 158-172 aa), LLLPQYSNAPELIY (aa 85-99 aa), FREGDIIALPAGVA (aa 149-163), AGRTSAIRALPDDV (aa 455-469 aa).

[0772] Mung Bean Vig_r_2: FGINAENNQRNFLA (aa 379-392 aa), GSLLLPHYNSKAIV (aa 300-313 aa), GINAENNQRNFLAG (aa 380-394), SLLLPHYNSKAIVI (aa 301-315 aa), QRNFLAGEKDNVIS (aa 387-400 aa).

[0773] Peanut Ara_h_3 MHC-II binding Epitope Peptides: HYNTNAHSIIYALR (aa 407-418 aa), LLILRWLGLSAEYG (aa 383-395 aa); GHVLVVPQNFAVAG (aa 443-455 aa); AHSIIYALRGRAHV (aa 412-424 aa); ALRGRAHVQVVDSN (aa 418-431 aa).

[0774] Cashew Ana_o_2 MHC-II binding Epitope Peptides: AGVAHWCYNEGNSP (aa 139-153 aa); EIWNLNSHSITYGCK (aa 333-344 aa); GDIIAIPAGVAHWC (aa 132-146 aa); LLLPQYSNAPQLIY (aa 72-86 aa); NGIEETICTMRLKE (aa 270-282 aa).

[0775] Common Buckwheat Fag_e_1 MHC-II binding Epitope Peptides: RINTVNSNNLPILE (aa 406-420 aa); QILVVPQGFAVVLK (476 aa-488 aa); PRAGRINTVNSNNL (402 aa-416 aa); SVLRAIPVEVLANS (516 aa-529 aa); TKLILSFSLCLMVL (2 aa-16 aa)

[0776] Synthesis of a Jug_r_4 Complete Antigen: 4.5 mg of a Jug_r_4 hapten, 2.0 mg of EDC (1-(3-dimethylaminopropyl)-3-ethylcarbodiimide hydrochloride) and 1.0 mg of NHS (N-hydroxysuccinimide) are dissolved in DMF (N,N-dimethylformamide), and stirred for activation at room temperature for 4 h to obtain a solution A; 5 mg of KLH is dissolved in 2 mL of the CB solution with a concentration of 0.05 mol/L and a pH of 9.6 to obtain a solution B; and the solution A is dropwise added to the solution B, and stirred at room temperature for reaction overnight to obtain a Jug_r_4 complete antigen.

[0777] Synthesis of Coating Antigens (Cross-Reactive Epitope Peptides): 5 mg of thiamethoxam hapten (TMX-COOH) and 4.8 mg of N-hydroxysuccinimide (NETS) are dissolved in 300 μL of anhydrous N,N-dimethylformamide (DMF), and the solution is stirred at room temperature to react for 10 min to obtain a TMX-COOH solution; 7.6 mg of 1-(3-dimethylaminopropyl)-3-ethylcarbodiimide hydrochloride (EDC) is dissolved in 100 μL of anhydrous DMF and then added to the TMX-COOH solution, and stirred at room temperature to react for 6-8 h to obtain a solution A; 10 mg of each WIC-II-binding epitope peptide is diluted with 1 mL of a phosphate buffer solution (PBS) with a concentration of 0.01 mmol/L and a pH of 7.4 to obtain a solution B; the solution A is slowly added dropwise to the solution B to react to obtain a reaction solution; the reaction solution is dialyzed with the PBS solution to remove the unreacted small molecular hapten to obtain a coating antigen (TMX-COOH-epitope peptide).

### Example 17. Preparation of a Hybridoma Cell Strain Secreting a Cross-Reactive Allergenic Polypeptide Monoclonal Antibody

[0778] Acquisition of Immunity in Animals: Healthy 6-8 week old BALB/c mice are selected for immunization. After a Cupin Jug_r_4 cross-reactive complete antigen (1 mg/mL) is emulsified uniformly with an equal amount of a Freund's adjuvant, BALB/c mice are immunized with the emulsified Jug_r_4 complete antigen by subcutaneous injection at a dose of 100 μL for each mouse. The first immunization is performed with a complete Freund's adjuvant, the booster immunization is performed with an incomplete Freund's adjuvant, and the immunization dose for the rush immunization is half of the dose for previous immunization; the Freund's adjuvants are directly used through intraperitoneal injection after being mixed with normal saline; the immunization interval of the immunizations is three weeks. After the third immunization, blood samples are taken at intervals of one week to detect serum titer and inhibitory effect; the mice with the best inhibitory effect are selected and are subject to rush immunization 21 days after the fifth immunization.

[0779] Cell Fusion: Three days after the rush immunization, cell fusion is carried out according to the conventional PEG (polyethylene glycol, with a molecular weight of 4000) method. The specific steps are as follows: (1) The mouse spleens are aseptically taken, ground and screened through a 200-mesh cell sieve to obtain a spleen cell suspension, and cells are counted; (2) SP2/0 cells are collected, suspended in a RPMI-1640 basal medium, and subjected to cell counting; and (3) Spleen cells and SP2/0 cells are mixed at a ratio of 1:10, centrifuged and fused with 50% PEG for 1 min, then the RPMI-1640 basal medium is added from slow to fast, the solution is centrifuged and then suspended in an RPMI-1640 screening medium containing 20% fetal bovine serum and 2% 50×HAT, and then added to a 96-well cell culture plate and cultured in an incubator at 37° C. in a 5% CO2 atmosphere.

[0780] Cell Screening and Cell Strain Establishment: The medium of the fused cells is semi-changed with an RPMI-1640 screening medium on the third day of cell fusion, and then completely changed with an RPMI-1640 transition medium containing 20% fetal bovine serum and 1% 100.times.HT on the 5th day. The cell supernatant is taken for screening on the 7th day. The screening is divided into two steps: the first step is to select positive cell wells by ic-ELISA, the second step is to use a cross-reactive peptide as a standard and measure the inhibitory effect of the positive cells by ic-ELISA. Cell wells with a good inhibitory effect to the cross-reactive peptide standard are selected and subcloned by a limiting dilution method. The same method is used for detection and repeated three times to obtain a cell strain.

[0781] Preparation and Identification of a Jug_r_4 cross-reactive peptide Monoclonal Antibody: 8-10 weeks old BALB/c mice are taken and each intraperitoneally injected with 1 mL of sterile paraffin oil, and 7 days later, intraperitoneally injected with a 1×106 hybridoma cell strain; ascites is collected from the 7th day and purified by an octanoic acid-ammonium sulfate method. Under an acidic condition, n-octanoic acid can precipitate heterologous proteins other than IgG immunoglobulin in ascites, then centrifugation is performed to remove the precipitate; the IgG monoclonal antibody is then precipitated with an ammonium sulfate solution with the equivalent saturability, centrifuged to remove the supernatant, dissolved in 0.01 M PBS solution (with a pH of 7.4), and dialyzed for desalting to finally obtain the purified monoclonal antibody, and the purified monoclonal antibody is stored at −20° C. By using an indirect competitive ELISA, the IC₅₀ of the monoclonal antibody is determined to be 2 μg/L, indicating a good sensitivity to Jug_r_4 cross-reactive peptide. Thus, the monoclonal antibody can be used for Jug_r_4 cross-reactive peptide immunoassay. Further, the lymphocytes harvested from the immunized host, or the hybridoma lines can be the source to derive antibody variable region sequences then used to make recombinant proteins.

### Example 18. Allergenic Potency of Multiple Allergen Oral Immunotherapeutic Compositions

[0782] A competitive ELISA is performed to measure the potency of various multiple allergen oral immunotherapeutic compositions. ELISA is based on coating allergens (full-length allergenic proteins and MHC-II-binding epitopes or polypeptides comprising such

[0783] MHC-II-binding epitopes) on multi-well plates and then allowing allergen-specific IgE from pooled human biological samples (e.g., serum) containing cross-reactive IgE antibodies to bind to the coated allergenic proteins and MHC-II binding epitope peptides on the multi-well plates and detecting bound IgE in the biological sample and detecting bound IgE with anti-IgE-alkaline phosphatase which converts pNPP to become detectable at 405 nm. Absorbance at 405 nm is proportional to the amounts of allergens present in the multiple allergen oral immunotherapeutic compositions.

[0784] In one study, potency is measured for a multiple allergen oral immunotherapeutic compositions comprising walnut Jug_r_4, Pecan Car_i_4, Hazelnut Cor_a_9, Mung Bean Vig_r_2, Peanut Ara_h_3, Cashew Ana_o_2 and Fag_e_1.

[0785] Walnut Jug_r_4 full-length proteins and MHC-II binding epitope peptides used for coating the multi-well plates are: HWNLNAHSVVYALR (aa 377-388 aa), VPHWNLNAHSVVYA (aa 375-389 aa), HTLPVLRWLQLSAE (aa 351-aa 365), DIIAFPAGVAHWSY (aa 145-aa157), LLLPQYSNAPQLVY (aa 83-97 aa).

[0786] Pecan Car_i_4 full-length proteins and MHC-II binding epitope peptides used for coating the multi-well plates are: HWNLNAHSVVYALR (aa 378-389 aa), AGVAHWCYNDGSSP (aa 152-166 aa), LPILRWLQLSAERG (aa 354-366 aa), DIIAFPAGVAHWCY (aa 146-159 aa), PAGVAHWCYNDGSS (aa 151-165 aa).

[0787] Hazelnut Cor_a_9 full-length proteins and MHC-II binding epitope peptides used for coating the multi-well plates are: HWNLNAHSVVYAIR (aa 382-393 aa), GDIIALPAGVAHWC (aa 152-166 aa), PAGVAHWCYNDGDS (aa 158-172 aa), LLLPQYSNAPELIY (aa 85-99 aa), FREGDIIALPAGVA (aa 149-163), AGRTSAIRALPDDV (aa 455-469 aa)

[0788] Mung Bean Vig_r_2 full-length proteins and MHC-II binding epitope peptides used for coating the multi-well plates are: FGINAENNQRNFLA (aa 379-392 aa), GSLLLPHYNSKAIV (aa 300-313 aa), GINAENNQRNFLAG (aa 380-394), SLLLPHYNSKAIVI (aa 301-315 aa), QRNFLAGEKDNVIS (aa 387-400 aa)

[0789] Peanut Ara_h_3 full-length proteins and MHC-II binding epitope peptides used for coating the multi-well plates are: HYNTNAHSIIYALR (aa 407-418 aa), LLILRWLGLSAEYG (aa 383-395 aa); GHVLVVPQNFAVAG (aa 443-455 aa); AHSIIYALRGRAHV (aa 412-424 aa); ALRGRAHVQVVDSN (aa 418-431 aa).

[0790] Cashew Ana_o_2 full-length proteins and MHC-II binding epitope peptides used for coating the multi-well plates are: AGVAHWCYNEGNSP (aa 139-153 aa); HWNLNSHSIIYGCK (aa 333-344 aa); GDIIAIPAGVAHWC (aa 132-146 aa); LLLPQYSNAPQLIY (aa 72-86 aa); NGIEETICTMRLKE (aa 270-282 aa).

[0791] Common Buckwheat Fag_e_1 full-length proteins and MHC-II binding epitope peptides used for coating the multi-well plates are: RINTVNSNNLPILE (aa 406-420 aa); QILVVPQGFAVVLK (476 aa-488 aa); PRAGRINTVNSNNL (402 aa-416 aa); SVLRAIPVEVLANS (516 aa-529 aa); TKLILSFSLCLMVL (2 aa-16 aa).

[0792] As controls, protein extracts from each of the food allergens: walnut, pecan, hazelnut, mung bean, peanut, cashew, and buckwheat are also coated on the microarray slides.

[0793] In a second study, potency of a multiple allergen oral immunotherapeutic compositions comprising a shrimp allergen, a cod allergen, a salmon allergen, a hen's egg allergen, a cow's milk allergen, a peanut allergen, a sesame allergen, a soy allergen, a pecan allergen, a cashew allergen, a hazelnut allergen, a walnut allergen, a pistachio allergen, an almond allergen, and a wheat allergen selected from Table 2 are evaluated. Crude extracts, recombinant or isolated full-length proteins and/or polypeptides comprising at least 4 epitopes from each allergen are selected and coated to multi-well plate to perform ELISA as described herein.

[0794] ELISA coating allergens, reference standards, quality control, and standard curve are each produced from the allergens. Reference standards are prepared with each allergenic protein, and the MHC-II-binding epitope peptides and from each food source flour prior to being extracted. Positive IgE pooled human sera for each allergen is generated by poling sera from subjects that are IgE positive for each allergen. The specific IgE for each peptide and full-length allergenic protein is determined.

[0795] Blocking buffer (5% FBS, 1% Tween 20) is prepared in PBS and stored in 4° C. for up to a month. Washing Buffer (1×PBS, 0.05% Tween 20) is prepared and stored at room temperature for up to a month.

[0796] Coating allergen samples are prepared by adding allergen extracts, recombinant full-length proteins and peptides to 50 mM sodium carbonate/sodium bicarbonate pH 9.2 and allowing adherence to a Greiner high binding plate overnight at 4° C. or at room temperature for 2 hours. Plates are washed 3 times with washing buffer, before being blocked with blocking buffer for an hour at room temperature, and washed 3 more time with washing buffer. Wells are finally emptied by flicking off and ready for sample loading.

[0797] The Positive pooled human sera are diluted 1: 40 in blocking buffer and incubated for 12 hours at 4° C. Diluted antihuman IgE-AP conjugate (1L500) is added to each well and the multi-well plates are incubated for 4 hours at room temperature. The plate contents are discarded and the multi-well plates are washed 3 times with wash buffer. pNPP substrate in TRIS buffer is added and the color reaction allowed to develop for 15-30 minutes at room temperature before being stopped by the addition of 50 mCL 3M NaOH. The multi-well plates are read at absorbance wavelength 405 nm.

[0798] Potencies of the multiple allergen oral immunotherapeutic compositions are provided.

### Example 19. Preparation of an Exemplary Multiple Allergen Oral Immunotherapeutic Composition

[0799] Three Cupin proteins that are cross-reactive with each other are selected from Table 10.

[0800] For example, Ber_e_1, Car_i_4, and Jug_n_4 are selected for preparation of a multiple allergen oral immunotherapy that includes full-length cross-reactive allergenic proteins.

[0801] Each of the 3 selected Cupin proteins are recombinantly synthesized in small batches as described below. Small scale recombinant proteins (≥75% purity, endotoxin level <10 EU/mg) are expressed in E. coli and/or in insect cells as a custom service by a commercial vendor (e.g., GenScript, NJ, USA) using codon optimized DNA constructs. Selected proteins are further expressed in a human embryonic kidney (HEK293) suspension cell line (Freestyle™ 293 Expression System, Thermo Fisher, MA, USA), according to the manufacturer's instructions. Briefly: 30 μg transfection grade, codon optimized plasmids encoding the protein of interest (made as a custom service by Genscript, NJ, USA), are mixed with 60 μl 293Fectin™, and incubated for 25 min. This mixture is added to 30 ml suspension culture of HEK293 cells with a cell density of 1×10⁶ cell/ml. The culture is incubated in 125 ml disposable, polycarbonate, Erlenmeyer flasks with vent caps (Corning, N.Y.) in a 37° C. incubator having a humidified atmosphere with 8% CO2 and orbital shaking at 125 rpm for 2-5 days before harvesting. Recombinant proteins secreted into the medium are harvested by sedimentation of the HEK293 cells at 100 g for 5 min. The cell supernatants are subsequently sterilized through a low protein binding Millex-GP 0.45 um filter (Millipore, MA, USA).

[0802] Equal amounts (1:1:1) of each of the three proteins Ber_e_1, Car_i_4, and Jug_n_4 on a w/w basis are lyophilized and packed neat into Vcaps vegetarian capsule (available from Capsugel) to create a multiple allergen oral composition comprising each cross-reactive allergenic protein at 300 mg/capsule.

### Example 20. Preparation of an Exemplary Multiple Allergen Oral Immunotherapeutic Composition

[0803] Peptide Synthesis and HPLC purification. Peptides are selected from Tables 13-23. Briefly peptides are synthesized on a Milligen/Biosearch 9600 peptide synthesizer using a 4-mthylbenzhydrylamine resin as the solid support (substitution 0.54 mm/g). The Fmoc/t-butyl synthetic methods is employed using 4(hydroxymethyl) phenoxyacetic acid as the linker. After the final deprotection step, protecting groups and peptide resin bond are cleaved with 90% TFA, 5% anisole, 3% tioanisole, 2% ethanediol. Crude peptide is purified by semi-preparative HPLC using a Vydac C4 (10 mm×25 cm) column at 32.5° C. buffers are 0.1% TFA in H₂O and 0.1% TFA in acetonitrile. Peptides incorporate a degenerate MHC as provided herein.

[0804] For example, the following cross-reactive MHC-II-binding T-cell epitope peptides are selected for preparation of an allergen oral immunotherapeutic vaccine composition.

[0805] Ber_e_2 14-mer peptide AIPAGVALWCYNDG—cross-reactive with five Cupin proteins Ana_o_2;Jug_n_4;Jug_r_4;Cor_a_9;Car_i_4 and capable of binding 25 MHC variants: HLA-DQA1*05:01/DQB1*03:01;HLA-DQA1*01:02/DQB1*06:02;HLA-DQA1*04:01/DQB1*04:02;HLA-DQA1*03:01/DQB1*03:02;HLA-DRB1*09:01;HLA-DQA1*01:01/DQB1*05:01;HLA-DQA1*05:01/DQB1*02:01;HLA-DRB1*01:01;HLA-DRB1*07:01;HLA-DRB5*01:01;HLA-DRB1*15:01;HLA-DPA1*01:03/DPB1*02:01;HLA-DRB1*11:01;HLA-DRB1*08:02;HLA-DRB1*12:01;HLA-DPA1*02:01/DPB1*01:01;HLA-DRB3*02:02;HLA-DRB1*04:01;HLA-DRB1*04:05;HLA-DPA1*03:01/DPB1*04:02;HLA-DPA1*02:01/DPB1*05:01;HLA-DRB4*01:01;HLA-DRB3*01:01;HLA-DRB1*13:02;HLA-DRB1*03:01;HLA-DRB1*09:01;HLA-DRB3*02:02;HLA-DPA1*01/DPB1*04:01;HLA-DQA1*05:01/DQB1*03:01.

[0806] Ber_e_2 14-mer peptide AIPAGVALWCYNDG—cross-reactive with 5 Cupin proteins Ana_o_2;Jug_n_4;Jug_r_4;Cor_a_9;Car_i_4 and is capable of binding 29 MHC variants: HLA-DQA1*05:01/DQB1*03:01;HLA-DQA1*01:02/DQB1*06:02;HLA-DQA1*04:01/DQB1*04:02;HLA-DQA1*03:01/DQB1*03:02;HLA-DRB1*09:01;HLA-DQA1*01:01/DQB1*05:01;HLA-DQA1*05:01/DQB1*02:01;HLA-DRB1*01:01;HLA-DRB1*07:01;HLA-DRB5*01:01;HLA-DRB1*15:01;HLA-DPA1*01:03/DPB1*02:01;HLA-DRB1*11:01;HLA-DRB1*08:02;HLA-DRB1*12:01;HLA-DPA1*02:01/DPB1*01:01;HLA-DRB3*02:02;HLA-DRB1*04:01;HLA-DRB1*04:05;HLA-DPA1*03:01/DPB1*04:02;HLA-DPA1*02:01/DPB1*05:01;HLA-DRB4*01:01;HLA-DRB3*01:01;HLA-DRB1*13:02;HLA-DRB1*03:01;HLA-DRB1*09:01;HLA-DRB3*02:02;HLA-DPA1*01/DPB1*04:01;HLA-DQA1*05:01/DQB1*03:01

[0807] Ber_e_2 14-mer peptide RGILGVLMPGCPET—cross-reactive with 4 Cupin proteins Jug_r_4; Cor_a_9; Car_i_4; and Jug_n_4 is capable of binding 79 MHC variants.

[0808] Ber_e_2 14-mer peptide PRAGRLTTVNSLKV—cross-reactive with 2 Cupin proteins Fag_t_13 S_globulin; and Fag_e_1 is capable of binding 80 MHC variants.

[0809] Briefly, 20 mg/ml acidified peptide solution (0.1 mg/mL) is loaded on to a Sephadex G-25 column and 5 ml fraction are eluted with 0.1 M HoAc. Peptide samples are measured spectrophotometrically at 235 nm and absorbance values plotted over time. Samples with absorbance over 0.1 and eluting before DTT are collected, pooled and lyophilized. Capillary zone electrophoresis is performed and sample is voltage separated. Mass spectrometry is performed and circular dichroism is measured at ambient temperature. Mean residue ellipticity (mdeg) is calculated. Fast atom bombardment mass spectrometry measurement is conducted. Peptides are dissolved in minimal amount of water and 100 mg/mm S-tBu solution is added. Peptide is placed under vacuum and precipitated by 2-mercaptoethanol in a 55° C. water bath while stirring. Solution is filtered and filtrate is rotary evaporated, acidified with 0.1% TFA in water and lyophilized. Equal amounts of lyophilized epitope peptides is placed in a glass vial and sealed until further use.

[0810] An oil-in-water emulsion is prepared by providing polysorbate 80 as surfactant and combined with lipids (6-10 carbon fatty acid esters of glycerol and 1,2-propanediol) and then further combining the mixture with distilled water to prepare the oil-in-water emulsion. Adjuvant (Aluminum hydroxide (alum)) and anti-oxidant (α-tocopherol) is also included in the emulsion and mixed to homogeneity and provided as a component in a kit that also includes the vial containing the lyophilized epitope peptides, and instructions for use. The lyophilized epitope peptides are combined with the emulsion of oil-in-water by injecting using a syringe or any other suitable means to create an allergen oral vaccine composition such that each epitope peptide is present in the final composition in equal amounts on a w/w basis and is about 500 nmol/mL.

### Example 21. Correlating Cross-Reactivity Between Allergic Proteins with High Sequence Similarity

[0811] In another example, forty-two human serum samples with self-reported clinical allergies were obtained and analyzed in triplicate on an ALEX2 chip (developed by Macro Array Diagnostics), which enables an ELISA-based multiplex assay for the detection of IgE adsorption to allergen components and extracts. The ALEX2 chip contains ˜300 allergenic proteins, including ten recombinant allergens from the Bet v 1 family, 12 from the Cupin family and 5 from the Tropomyosin family. The assay detects the binding of IgE to these allergens in an ELISA-based multiplex fashion. The dynamic range of the chip spans a little over two orders of magnitude, 0.3-50 kUA/L.

[0812] Based on the assay, twenty-two (22) samples had a positive value for the Bet v 1 allergen from the forty two samples run on the ALEX2 chip. Considering there are 9 other allergenic proteins from the Bet v 1 family on this ALEX2 chip, and based on the cross-reactivity predicted by the computational methods described herein, a correlation between the reactivity observed for these 22 samples was expected. As seen in tables 25 (Bet v 1 family) and 26 (Tropomyosin family) below, a high sequence similarity between allergenic proteins generally corresponds to a high degree of correlation between the IgE levels. The observed high correlation between a pattern on the chip and a pattern predicted computationally therefore showed that a computation method (as described herein) can predict potential cross-reactivity between allergenic proteins with a very high degree of certainty.

TABLE 25
Bet v 1 Family

| | | Pearson | % sequence |
|---|---|---|---|
| | | Correlation | similarity |
| | | coefficient | based on |
| Allergen | Common | based on | RISC plots to |
| name | Name | ALEX data | Bet v 1 |
| Bet v 1 | Silver birch | 1.00 | 100 |
| Cor a 1.0103 | Hazel | 0.78 | 82 |
| Cor a 1.0401 | Hazelnut | 0.71 | 81.25 |
| Fag s 1 | Beech | 0.67 | 76.25 |
| Mal d 1 | Apple | 0.62 | 68.55 |
| Ara h 8 | Peanut | 0.55 | 63.05 |
| Gly m 4 | Soy | 0.52 | 62.02 |
| Aln g 1 | Alder | 0.52 | 88.12 |
| Fra a 1 + 3 | Strawberry | 0.50 | 68.12 |
| Api g 1 | Celery | 0.42 | 57.79 |
| Dau c 1 | Carrot | 0.37 | 51.25 |

TABLE 26
Tropomyosin Family

| | | Pearson | % sequence |
|---|---|---|---|
| | | Correlation | similarity |
| | | coefficient | based on |
| Allergen | | based on | RISC plots |
| name | Common Name | ALEX data | to Penm1 |
| Penm1 | Black-Tiger shrimp | 1.00 | 100.00 |
| Pera7 | American cockroach | 0.99 | 82.04 |
| Blot | Blomia tropicalis | 0.98 | 80.28 |
| Derp | European house dust | 0.99 | 80.28 |
| | mite | | |
| Anis | Anisakis simplex | 0.99 | 72.88 |

### INCORPORATION BY REFERENCE

[0813] All publications and patents mentioned herein, including those items listed below, are hereby incorporated by reference in their entirety for all purposes as if each individual publication or patent was specifically and individually incorporated by reference. In case of conflict, the present application, including any definitions herein, will control.

### EQUIVALENTS

[0814] While specific embodiments of the subject disclosure have been discussed, the above specification is illustrative and not restrictive. Many variations of the disclosure will become apparent to those skilled in the art upon review of this specification. The full scope of the disclosure should be determined by reference to the claims, along with their full scope of equivalents, and the specification, along with such variations.

Lengthy table referenced here
US20240133898A1-20240425-T00001
Please refer to the end of the specification for access instructions.

Lengthy table referenced here
US20240133898A1-20240425-T00002
Please refer to the end of the specification for access instructions.

Lengthy table referenced here
US20240133898A1-20240425-T00003
Please refer to the end of the specification for access instructions.

Lengthy table referenced here
US20240133898A1-20240425-T00004
Please refer to the end of the specification for access instructions.

Lengthy table referenced here
US20240133898A1-20240425-T00005
Please refer to the end of the specification for access instructions.

Lengthy table referenced here
US20240133898A1-20240425-T00006
Please refer to the end of the specification for access instructions.

Lengthy table referenced here
US20240133898A1-20240425-T00007
Please refer to the end of the specification for access instructions.

Lengthy table referenced here
US20240133898A1-20240425-T00008
Please refer to the end of the specification for access instructions.

Lengthy table referenced here
US20240133898A1-20240425-T00009
Please refer to the end of the specification for access instructions.

Lengthy table referenced here
US20240133898A1-20240425-T00010
Please refer to the end of the specification for access instructions.

Lengthy table referenced here
US20240133898A1-20240425-T00011
Please refer to the end of the specification for access instructions.

Lengthy table referenced here
US20240133898A1-20240425-T00012
Please refer to the end of the specification for access instructions.

Lengthy table referenced here
US20240133898A1-20240425-T00013
Please refer to the end of the specification for access instructions.

Lengthy table referenced here
US20240133898A1-20240425-T00014
Please refer to the end of the specification for access instructions.

Lengthy table referenced here
US20240133898A1-20240425-T00015
Please refer to the end of the specification for access instructions.

Lengthy table referenced here
US20240133898A1-20240425-T00016
Please refer to the end of the specification for access instructions.

Lengthy table referenced here
US20240133898A1-20240425-T00017
Please refer to the end of the specification for access instructions.

Lengthy table referenced here
US20240133898A1-20240425-T00018
Please refer to the end of the specification for access instructions.

Lengthy table referenced here
US20240133898A1-20240425-T00019
Please refer to the end of the specification for access instructions.

Lengthy table referenced here
US20240133898A1-20240425-T00020
Please refer to the end of the specification for access instructions.

Lengthy table referenced here
US20240133898A1-20240425-T00021
Please refer to the end of the specification for access instructions.

Lengthy table referenced here
US20240133898A1-20240425-T00022
Please refer to the end of the specification for access instructions.

Lengthy table referenced here
US20240133898A1-20240425-T00023
Please refer to the end of the specification for access instructions.

Lengthy table referenced here
US20240133898A1-20240425-T00024
Please refer to the end of the specification for access instructions.

LENGTHY TABLES
The patent application contains a lengthy table section. A copy of the table is available in electronic form from the USPTO web site (https://seqdata.uspto.gov/?pageRequest=docDetail&DocID=US20240133898A1). An electronic copy of the table will also be available from the USPTO upon request and payment of the fee set forth in 37 CFR 1.19(b)(3).

The application's sequence listing, which the Patent Office published only in electronic form, follows.

SEQUENCE LISTING (12009 sequences)

SEQ ID NO: 1 - protein, 15 aa, Carya illinoinensis
HWNLNAHSVVYALRG

SEQ ID NO: 2 - protein, 15 aa, Corylus avellana
HWNLNAHSVVYAIRG

SEQ ID NO: 3 - protein, 15 aa, Juglans nigra
HWNLNAHSVVYALRG

SEQ ID NO: 4 - protein, 15 aa, Juglans regia
HWNLNAHSVVYALRG

SEQ ID NO: 5 - protein, 15 aa, Pistacia vera
HWNVNAHSIVYITRG

SEQ ID NO: 6 - protein, 15 aa, Pistacia vera
HWNFNAHSIVYGCKG

SEQ ID NO: 7 - protein, 15 aa, Sesamum indicum
HWNLNAHSIIYITRG

SEQ ID NO: 8 - protein, 15 aa, Vigna radiata
FGINAENNQRNFLAG

SEQ ID NO: 9 - protein, 15 aa, Anacardium occidentale
HWNLNSHSIIYGCKG

SEQ ID NO: 10 - protein, 15 aa, Anacardium occidentale
AGVAHWCYNEGNSPV

SEQ ID NO: 11 - protein, 15 aa, Arachis hypogaea
HYNTNAHSIIYALRG

SEQ ID NO: 12 - protein, 15 aa, Carya illinoinensis
LPILRWLQLSAERGA

SEQ ID NO: 13 - protein, 15 aa, Carya illinoinensis
AGVAHWCYNDGSSPV

SEQ ID NO: 14 - protein, 15 aa, Glycine max
NAENNQRNFLAGSQD

SEQ ID NO: 15 - protein, 15 aa, Juglans nigra
HTLPVLRWLQLSAER

SEQ ID NO: 16 - protein, 15 aa, Juglans regia
HTLPVLRWLQLSAER

SEQ ID NO: 17 - protein, 15 aa, Lens culinaris
FGINAKNNQRNFLAG

SEQ ID NO: 18 - protein, 15 aa, Lens culinaris
INAKNNQRNFLAGEE

SEQ ID NO: 19 - protein, 15 aa, Pisum sativum
FGINAENNERNFLAG

SEQ ID NO: 20 - protein, 15 aa, Pistacia vera
PHWNVNAHSIVYITR

SEQ ID NO: 21 - protein, 15 aa, Prunus Dulcis
HWNVNAHSVVYVIRG

SEQ ID NO: 22 - protein, 15 aa, Sesamum indicum
PHWNLNAHSIIYITR

SEQ ID NO: 23 - protein, 15 aa, Anacardium occidentale
GDIIAIPAGVAHWCY

SEQ ID NO: 24 - protein, 15 aa, Anacardium occidentale
IIAIPAGVAHWCYNE

SEQ ID NO: 25 - protein, 15 aa, Anacardium occidentale
DIIAIPAGVAHWCYN

SEQ ID NO: 26 - protein, 15 aa, Bertholletia excelsa
AGVALWCYNDGDEDL

SEQ ID NO: 27 - protein, 15 aa, Bertholletia excelsa
GDIIAIPAGVALWCY

SEQ ID NO: 28 - protein, 15 aa, Bertholletia excelsa
DIIAIPAGVALWCYN

SEQ ID NO: 29 - protein, 15 aa, Bertholletia excelsa
QLDQNPRHFFLAGNI

SEQ ID NO: 30 - protein, 15 aa, Bertholletia excelsa
IIAIPAGVALWCYND

SEQ ID NO: 31 - protein, 15 aa, Carya illinoinensis
VPHWNLNAHSVVYAL

SEQ ID NO: 32 - protein, 15 aa, Carya illinoinensis
IIAFPAGVAHWCYND

SEQ ID NO: 33 - protein, 15 aa, Carya illinoinensis
PAGVAHWCYNDGSSP

SEQ ID NO: 34 - protein, 15 aa, Carya illinoinensis
DIIAFPAGVAHWCYN

SEQ ID NO: 35 - protein, 15 aa, Carya illinoinensis
PHWNLNAHSVVYALR

SEQ ID NO: 36 - protein, 15 aa, Corylus avellana
VPHWNLNAHSVVYAI

SEQ ID NO: 37 - protein, 15 aa, Corylus avellana
DIIALPAGVAHWCYN

SEQ ID NO: 38 - protein, 15 aa, Corylus avellana
QLDENPRHFYLAGNP

SEQ ID NO: 39 - protein, 15 aa, Corylus avellana
GDIIALPAGVAHWCY

SEQ ID NO: 40 - protein, 15 aa, Corylus avellana
AGVAHWCYNDGDSPV

SEQ ID NO: 41 - protein, 15 aa, Corylus avellana
PAGVAHWCYNDGDSP

SEQ ID NO: 42 - protein, 15 aa, Corylus avellana
IIALPAGVAHWCYND

SEQ ID NO: 43 - protein, 15 aa, Corylus avellana
PHWNLNAHSVVYAIR

SEQ ID NO: 44 - protein, 15 aa, Glycine max
IGINAENNQRNFLAG

SEQ ID NO: 45 - protein, 15 aa, Glycine max
GALLLPHFNSKAIVI

SEQ ID NO: 46 - protein, 15 aa, Glycine max
HWNLNANSVIYVTRG

SEQ ID NO: 47 - protein, 15 aa, Juglans nigra
PAGVAHWCYNDGDTP

SEQ ID NO: 48 - protein, 15 aa, Juglans nigra
AGVAHWCYNDGDTPV

SEQ ID NO: 49 - protein, 15 aa, Juglans nigra
VPHWNLNAHSVVYAL

SEQ ID NO: 50 - protein, 15 aa, Juglans nigra
VIAFPAGVAHWCYND

SEQ ID NO: 51 - protein, 15 aa, Juglans nigra
DVIAFPAGVAHWCYN

SEQ ID NO: 52 - protein, 15 aa, Juglans nigra
PHWNLNAHSVVYALR

SEQ ID NO: 53 - protein, 15 aa, Juglans regia
AGVAHWSYNDGSNPV

SEQ ID NO: 54 - protein, 15 aa, Juglans regia
VPHWNLNAHSVVYAL

SEQ ID NO: 55 - protein, 15 aa, Juglans regia
IIAFPAGVAHWSYND

SEQ ID NO: 56 - protein, 15 aa, Juglans regia
PHWNLNAHSVVYALR

SEQ ID NO: 57 - protein, 15 aa, Juglans regia
DIIAFPAGVAHWSYN

SEQ ID NO: 58 - protein, 15 aa, Juglans regia
PAGVAHWSYNDGSNP

SEQ ID NO: 59 - protein, 15 aa, Lens culinaris
NAKNNQRNFLAGEED

SEQ ID NO: 60 - protein, 15 aa, Lupinus albus
GALLLPHYNSKAIFI

SEQ ID NO: 61 - protein, 15 aa, Lupinus angustifolius
GALLLPHYNSKAIFI

SEQ ID NO: 62 - protein, 15 aa, Pisum sativum
NAENNERNFLAGEED

SEQ ID NO: 63 - protein, 15 aa, Pisum sativum
GINAENNERNFLAGE

SEQ ID NO: 64 - protein, 15 aa, Pistacia vera
VIALPAGVAHWIYNN

SEQ ID NO: 65 - protein, 15 aa, Pistacia vera
DVIALPAGVAHWIYN

SEQ ID NO: 66 - protein, 15 aa, Pistacia vera
NGLEETICTMKLKEN

SEQ ID NO: 67 - protein, 15 aa, Pistacia vera
IIALPAGVANWCYNE

SEQ ID NO: 68 - protein, 15 aa, Pistacia vera
DIIALPAGVANWCYN

SEQ ID NO: 69 - protein, 15 aa, Pistacia vera
GDIIALPAGVANWCY

SEQ ID NO: 70 - protein, 15 aa, Pistacia vera
LPILKWLQLSAERGV

SEQ ID NO: 71 - protein, 15 aa, Prunus Dulcis
AGVAYWSYNDGDQEL

SEQ ID NO: 72 - protein, 15 aa, Prunus Dulcis
SPHWNVNAHSVVYVI

SEQ ID NO: 73 - protein, 15 aa, Prunus Dulcis
GLEETFCSLRLKENI

SEQ ID NO: 74 - protein, 15 aa, Sesamum indicum
SGAAHWCYNDGSEDL

SEQ ID NO: 75 - protein, 15 aa, Vigna radiata
NAENNQRNFLAGEKD

SEQ ID NO: 76 - protein, 15 aa, Vigna radiata
GSLLLPHYNSKAIVI

SEQ ID NO: 77 - protein, 15 aa, Vigna radiata
GINAENNQRNFLAGE

SEQ ID NO: 78 - protein, 15 aa, Anacardium occidentale
LPHWNLNSHSIIYGC

SEQ ID NO: 79 - protein, 15 aa, Anacardium occidentale
LLLPQYSNAPQLIYV

SEQ ID NO: 80 - protein, 15 aa, Anacardium occidentale
IAIPAGVAHWCYNEG

SEQ ID NO: 81 - protein, 15 aa, Anacardium occidentale
EWISFKTNDRAMTSP

SEQ ID NO: 82 - protein, 15 aa, Anacardium occidentale
RRGDIIAIPAGVAHW

SEQ ID NO: 83 - protein, 15 aa, Anacardium occidentale
NGIEETICTMRLKEN

SEQ ID NO: 84 - protein, 15 aa, Anacardium occidentale
RGDIIAIPAGVAHWC

SEQ ID NO: 85 - protein, 15 aa, Arachis hypogaea
INAENNHRIFLAGDK

SEQ ID NO: 86 - protein, 15 aa, Arachis hypogaea
LLILRWLGLSAEYGN

SEQ ID NO: 87 - protein, 15 aa, Bertholletia excelsa
LDQNPRHFFLAGNIQ

SEQ ID NO: 88 - protein, 15 aa, Bertholletia excelsa
IAIPAGVALWCYNDG

SEQ ID NO: 89 - protein, 15 aa, Bertholletia excelsa
QNPRHFFLAGNIQRS

SEQ ID NO: 90 - protein, 15 aa, Carya illinoinensis
INGKNNQRNFLAGQN

SEQ ID NO: 91 - protein, 15 aa, Carya illinoinensis
GINGKNNQRNFLAGQ

SEQ ID NO: 92 - protein, 15 aa, Carya illinoinensis
EWVSFKTNENAMVSP

SEQ ID NO: 93 - protein, 15 aa, Carya illinoinensis
NLPILRWLQLSAERG

SEQ ID NO: 94 - protein, 15 aa, Carya illinoinensis
ILRWLQLSAERGALY

SEQ ID NO: 95 - protein, 15 aa, Carya illinoinensis
LDQNPRNFYLAGNPD

SEQ ID NO: 96 - protein, 15 aa, Carya illinoinensis
GRISTVNSHNLPILR

SEQ ID NO: 97 - protein, 15 aa, Carya illinoinensis
IAFPAGVAHWCYNDG

SEQ ID NO: 98 - protein, 15 aa, Carya illinoinensis
EGDIIAFPAGVAHWC

SEQ ID NO: 99 - protein, 15 aa, Carya illinoinensis
LLLPHYSNAPQLVYI

SEQ ID NO: 100 - protein, 15 aa, Carya illinoinensis
QLDQNPRNFYLAGNP

SEQ ID NO: 101 - protein, 15 aa, Carya illinoinensis
GDIIAFPAGVAHWCY

SEQ ID NO: 102 - protein, 15 aa, Carya illinoinensis
QNPRNFYLAGNPDDE

SEQ ID NO: 103 - protein, 15 aa, Carya illinoinensis
AGRTSAIRALPEEVL

SEQ ID NO: 104 - protein, 15 aa, Carya illinoinensis
REGDIIAFPAGVAHW

SEQ ID NO: 105 - protein, 15 aa, Carya illinoinensis
NQLDQNPRNFYLAGN

SEQ ID NO: 106 - protein, 15 aa, Carya illinoinensis
HNLPILRWLQLSAER

SEQ ID NO: 107 - protein, 15 aa, Carya illinoinensis
DDNGLEETICTLSLR

SEQ ID NO: 108 - protein, 15 aa, Carya illinoinensis
PILRWLQLSAERGAL

SEQ ID NO: 109 - protein, 15 aa, Carya illinoinensis
FREGDIIAFPAGVAH

SEQ ID NO: 110 - protein, 15 aa, Carya illinoinensis
RISTVNSHNLPILRW

SEQ ID NO: 111 - protein, 15 aa, Corylus avellana
EGDIIALPAGVAHWC

SEQ ID NO: 112 - protein, 15 aa, Corylus avellana
FREGDIIALPAGVAH

SEQ ID NO: 113 - protein, 15 aa, Corylus avellana
PVLRWLQLSAERGDL

SEQ ID NO: 114 - protein, 15 aa, Corylus avellana
IALPAGVAHWCYNDG

SEQ ID NO: 115 - protein, 15 aa, Corylus avellana
LDENPRHFYLAGNPD

SEQ ID NO: 116 - protein, 15 aa, Corylus avellana
LLLPQYSNAPELIYI

SEQ ID NO: 117 - protein, 15 aa, Corylus avellana
NQLDENPRHFYLAGN

SEQ ID NO: 118 - protein, 15 aa, Corylus avellana
AGRTSAIRALPDDVL

SEQ ID NO: 119 - protein, 15 aa, Corylus avellana
ENPRHFYLAGNPDDE

SEQ ID NO: 120 - protein, 15 aa, Corylus avellana
REGDIIALPAGVAHW

SEQ ID NO: 121 - protein, 15 aa, Corylus avellana
ALPAGVAHWCYNDGD

SEQ ID NO: 122 - protein, 15 aa, Glycine max
ALLLPHFNSKAIVIL

SEQ ID NO: 123 - protein, 15 aa, Glycine max
INAENNQRNFLAGSQ

SEQ ID NO: 124 - protein, 15 aa, Glycine max
GINAENNQRNFLAGS

SEQ ID NO: 125 - protein, 15 aa, Glycine max
LDQTPRVFYLAGNPD

SEQ ID NO: 126 - protein, 15 aa, Glycine max
QLDQTPRVFYLAGNP

SEQ ID NO: 127 - protein, 15 aa, Juglans nigra
EWVSFKTNENAMVSP

SEQ ID NO: 128 - protein, 15 aa, Juglans nigra
TIPQNFAVVKRARNE

SEQ ID NO: 129 - protein, 15 aa, Juglans nigra
LDQNPRNFYLAGNPD

SEQ ID NO: 130 - protein, 15 aa, Juglans nigra
IAFPAGVAHWCYNDG

SEQ ID NO: 131 - protein, 15 aa, Juglans nigra
FREGDVIAFPAGVAH

SEQ ID NO: 132 - protein, 15 aa, Juglans nigra
DDNGLEETICTLRLR

SEQ ID NO: 133 - protein, 15 aa, Juglans nigra
EGDVIAFPAGVAHWC

SEQ ID NO: 134 - protein, 15 aa, Juglans nigra
QLDQNPRNFYLAGNP

SEQ ID NO: 135 - protein, 15 aa, Juglans nigra
LLLPQYSNAPQLLYI

SEQ ID NO: 136 - protein, 15 aa, Juglans nigra
QNPRNFYLAGNPDDE

SEQ ID NO: 137 - protein, 15 aa, Juglans nigra
AGRTSAIRALPEEVL

SEQ ID NO: 138 - protein, 15 aa, Juglans nigra
PVLRWLQLSAERGAL

SEQ ID NO: 139 - protein, 15 aa, Juglans nigra
GDVIAFPAGVAHWCY

SEQ ID NO: 140 - protein, 15 aa, Juglans nigra
REGDVIAFPAGVAHW

SEQ ID NO: 141 - protein, 15 aa, Juglans nigra
TLPVLRWLQLSAERG

SEQ ID NO: 142 - protein, 15 aa, Juglans nigra
NQLDQNPRNFYLAGN

SEQ ID NO: 143 - protein, 15 aa, Juglans regia
NGENNQRDFLAGQNN

SEQ ID NO: 144 - protein, 15 aa, Juglans regia
EWVSFKTNENAMVSP

SEQ ID NO: 145 - protein, 15 aa, Juglans regia
RISTVNSHTLPVLRW

SEQ ID NO: 146 - protein, 15 aa, Juglans regia
TIPQNFAVVKRARNE

SEQ ID NO: 147 - protein, 15 aa, Juglans regia
LDQNPRNFYLAGNPD

SEQ ID NO: 148 - protein, 15 aa, Juglans regia
DDNGLEETICTLRLR

SEQ ID NO: 149 - protein, 15 aa, Juglans regia
LLLPQYSNAPQLVYI

SEQ ID NO: 150 - protein, 15 aa, Juglans regia
QLDQNPRNFYLAGNP

SEQ ID NO: 151 - protein, 15 aa, Juglans regia
QNPRNFYLAGNPDDE

SEQ ID NO: 152 - protein, 15 aa, Juglans regia
AGRTSAIRALPEEVL

SEQ ID NO: 153 - protein, 15 aa, Juglans regia
GRISTVNSHTLPVLR

SEQ ID NO: 154 - protein, 15 aa, Juglans regia
PVLRWLQLSAERGAL

SEQ ID NO: 155 - protein, 15 aa, Juglans regia
REGDIIAFPAGVAHW

SEQ ID NO: 156 - protein, 15 aa, Juglans regia
EGDIIAFPAGVAHWS

SEQ ID NO: 157 - protein, 15 aa, Juglans regia
IAFPAGVAHWSYNDG

SEQ ID NO: 158 - protein, 15 aa, Juglans regia
TLPVLRWLQLSAERG

SEQ ID NO: 159 - protein, 15 aa, Juglans regia
GDIIAFPAGVAHWSY

SEQ ID NO: 160 - protein, 15 aa, Juglans regia
NQLDQNPRNFYLAGN

SEQ ID NO: 161 - protein, 15 aa, Juglans regia
FREGDIIAFPAGVAH

SEQ ID NO: 162 - protein, 15 aa, Lens culinaris
GINAKNNQRNFLAGE

SEQ ID NO: 163 - protein, 15 aa, Lupinus albus
GINAYENQRNFLAGS

SEQ ID NO: 164 - protein, 15 aa, Lupinus albus
ALLLPHYNSKAIFIV

SEQ ID NO: 165 - protein, 15 aa, Lupinus albus
NAYENQRNFLAGSED

SEQ ID NO: 166 - protein, 15 aa, Lupinus angustifolius
NANENQRNFLAGSED

SEQ ID NO: 167 - protein, 15 aa, Lupinus angustifolius
GINANENQRNFLAGS

SEQ ID NO: 168 - protein, 15 aa, Lupinus angustifolius
ALLLPHYNSKAIFIV

SEQ ID NO: 169 - protein, 15 aa, Pisum sativum
INAENNERNFLSGSD

SEQ ID NO: 170 - protein, 15 aa, Pisum sativum
NAENNERNFLSGSDD

SEQ ID NO: 171 - protein, 15 aa, Pistacia vera
GDVIALPAGVAHWIY

SEQ ID NO: 172 - protein, 15 aa, Pistacia vera
EGDVIALPAGVAHWI

SEQ ID NO: 173 - protein, 15 aa, Pistacia vera
LPILRFLQLSAKKGV

SEQ ID NO: 174 - protein, 15 aa, Pistacia vera
KGDIIALPAGVANWC

SEQ ID NO: 175 - protein, 15 aa, Pistacia vera
ILKWLQLSAERGVLQ

SEQ ID NO: 176 - protein, 15 aa, Pistacia vera
PILKWLQLSAERGVL

SEQ ID NO: 177 - protein, 15 aa, Pistacia vera
EWISFKTNDRAMISP

SEQ ID NO: 178 - protein, 15 aa, Pistacia vera
LNLPILKWLQLSAER

SEQ ID NO: 179 - protein, 15 aa, Pistacia vera
IALPAGVANWCYNEG

SEQ ID NO: 180 - protein, 15 aa, Pistacia vera
RKGDIIALPAGVANW

SEQ ID NO: 181 - protein, 15 aa, Prunus Dulcis
QLDQNPRKFYLAGNP

SEQ ID NO: 182 - protein, 15 aa, Prunus Dulcis
LDQNPRKFYLAGNPE

SEQ ID NO: 183 - protein, 15 aa, Prunus Dulcis
LPILRFLRLSAERGF

SEQ ID NO: 184 - protein, 15 aa, Prunus Dulcis
HNLPILRFLRLSAER

SEQ ID NO: 185 - protein, 15 aa, Sesamum indicum
APHWNLNAHSIIYIT

SEQ ID NO: 186 - protein, 15 aa, Sesamum indicum
EWISFKTNDNAMTSQ

SEQ ID NO: 187 - protein, 15 aa, Sinapis alba
NFEWISFKTNANAMI

SEQ ID NO: 188 - protein, 15 aa, Sinapis alba
AGRTSALRALPLEVI

SEQ ID NO: 189 - protein, 15 aa, Sinapis alba
NGLEETICSMRTHEN

SEQ ID NO: 190 - protein, 15 aa, Vigna radiata
SLLLPHYNSKAIVIL

SEQ ID NO: 191 - protein, 15 aa, Anacardium occidentale
QMLVVPQNFAVVKRA

SEQ ID NO: 192 - protein, 15 aa, Anacardium occidentale
KWLQLSVEKGVLYKN

SEQ ID NO: 193 - protein, 15 aa, Anacardium occidentale
AIPAGVAHWCYNEGN

SEQ ID NO: 194 - protein, 15 aa, Anacardium occidentale
NLPILKWLQLSVEKG

SEQ ID NO: 195 - protein, 15 aa, Anacardium occidentale
LPILKWLQLSVEKGV

SEQ ID NO: 196 - protein, 15 aa, Anacardium occidentale
AHWCYNEGNSPVVTV

SEQ ID NO: 197 - protein, 15 aa, Anacardium occidentale
GLLLPQYSNAPQLIY

SEQ ID NO: 198 - protein, 15 aa, Anacardium occidentale
VLANAFQISREDARK

SEQ ID NO: 199 - protein, 15 aa, Anacardium occidentale
PILKWLQLSVEKGVL

SEQ ID NO: 200 - protein, 15 aa, Anacardium occidentale
VVPQNFAVVKRAREE

SEQ ID NO: 201 - protein, 15 aa, Anacardium occidentale
GQMLVVPQNFAVVKR

SEQ ID NO: 202 - protein, 15 aa, Anacardium occidentale
DRHQKIRRFRRGDII

SEQ ID NO: 203 - protein, 15 aa, Anacardium occidentale
NGLLLPQYSNAPQLI

SEQ ID NO: 204 - protein, 15 aa, Arachis hypogaea
FSRNTLEAAFNAEFN

SEQ ID NO: 205 - protein, 15 aa, Arachis hypogaea
FGINAENNHRIFLAG

SEQ ID NO: 206 - protein, 15 aa, Arachis hypogaea
GHVLVVPQNFAVAGK

SEQ ID NO: 207 - protein, 15 aa, Bertholletia excelsa
VLMPGCPETFQSMSQ

SEQ ID NO: 208 - protein, 15 aa, Bertholletia excelsa
AIPAGVALWCYNDGD

SEQ ID NO: 209 - protein, 15 aa, Carya illinoinensis
FGINGKNNQRNFLAG

SEQ ID NO: 210 - protein, 15 aa, Carya illinoinensis
DIFVIPAGHPIAITA

SEQ ID NO: 211 - protein, 15 aa, Carya illinoinensis
NGKNNQRNFLAGQNN

SEQ ID NO: 212 - protein, 15 aa, Carya illinoinensis
AFPAGVAHWCYNDGS

SEQ ID NO: 213 - protein, 15 aa, Carya illinoinensis
GVLFPGCPETFEESQ

SEQ ID NO: 214 - protein, 15 aa, Carya illinoinensis
NGLLLPHYSNAPQLV

SEQ ID NO: 215 - protein, 15 aa, Carya illinoinensis
LRWLQLSAERGALYS

SEQ ID NO: 216 - protein, 15 aa, Carya illinoinensis
QDRHQKIRHFREGDI

SEQ ID NO: 217 - protein, 15 aa, Carya illinoinensis
PLAGRTSAIRALPEE

SEQ ID NO: 218 - protein, 15 aa, Carya illinoinensis
GLLLPHYSNAPQLVY

SEQ ID NO: 219 - protein, 15 aa, Carya illinoinensis
AGRISTVNSHNLPIL

SEQ ID NO: 220 - protein, 15 aa, Carya illinoinensis
AHSVVYALRGRAEVQ

SEQ ID NO: 221 - protein, 15 aa, Carya illinoinensis
AHWCYNDGSSPVVAI

SEQ ID NO: 222 - protein, 15 aa, Carya illinoinensis
RWLQLSAERGALYSD

SEQ ID NO: 223 - protein, 15 aa, Corylus avellana
VVFVAPAGHPVAVIA

SEQ ID NO: 224 - protein, 15 aa, Corylus avellana
VLRWLQLSAERGDLQ

SEQ ID NO: 225 - protein, 15 aa, Corylus avellana
SPLAGRTSAIRALPD

SEQ ID NO: 226 - protein, 15 aa, Corylus avellana
EQDRHQKIRHFREGD

SEQ ID NO: 227 - protein, 15 aa, Corylus avellana
GLLLPQYSNAPELIY

SEQ ID NO: 228 - protein, 15 aa, Corylus avellana
AHWCYNDGDSPVVTV

SEQ ID NO: 229 - protein, 15 aa, Corylus avellana
RINTVNSNTLPVLRW

SEQ ID NO: 230 - protein, 15 aa, Corylus avellana
NGLLLPQYSNAPELI

SEQ ID NO: 231 - protein, 15 aa, Corylus avellana
RWLQLSAERGDLQRE

SEQ ID NO: 232 - protein, 15 aa, Corylus avellana
PLAGRTSAIRALPDD

SEQ ID NO: 233 - protein, 15 aa, Corylus avellana
GVLFPGCPETFEDPQ

SEQ ID NO: 234 - protein, 15 aa, Fagopyrum esculentum
RINTVNSNNLPILEF

SEQ ID NO: 235 - protein, 15 aa, Fagopyrum esculentum
QILVVPQGFAVVLKA

SEQ ID NO: 236 - protein, 15 aa, Fagopyrum esculentum
GRINTVNSNNLPILE

SEQ ID NO: 237 - protein, 15 aa, Fagopyrum tataricum
RINTVNSNNLPILEF

SEQ ID NO: 238 - protein, 15 aa, Fagopyrum tataricum
QILVVPQGFAVVLKA

SEQ ID NO: 239 - protein, 15 aa, Fagopyrum tataricum
GRINTVNSNNLPILE

SEQ ID NO: 240 - protein, 15 aa, Glycine max
IYSNKLGKFFEITPE

SEQ ID NO: 241 - protein, 15 aa, Glycine max
QRNFLAGSQDNVISQ

SEQ ID NO: 242 - protein, 15 aa, Glycine max
EGALLLPHFNSKAIV

SEQ ID NO: 243 - protein, 15 aa, Glycine max
ITPEKNPQLRDLDIF

SEQ ID NO: 244 - protein, 15 aa, Glycine max
DSHQKIRHFNEGDVL

SEQ ID NO: 245 - protein, 15 aa, Glycine max
VAIPGCPETFEEPQE

SEQ ID NO: 246 - protein, 15 aa, Glycine max
QTPRVFYLAGNPDIE

SEQ ID NO: 247 - protein, 15 aa, Juglans nigra
GVLFPGCPETFEESQ

SEQ ID NO: 248 - protein, 15 aa, Juglans nigra
VLRWLQLSAERGALY

SEQ ID NO: 249 - protein, 15 aa, Juglans nigra
GLLLPQYSNAPQLLY

SEQ ID NO: 250 - protein, 15 aa, Juglans nigra
PLAGRTSAIRALPEE

SEQ ID NO: 251 - protein, 15 aa, Juglans nigra
NGLLLPQYSNAPQLL

SEQ ID NO: 252 - protein, 15 aa, Juglans nigra
AHSVVYALRGRAEVQ

SEQ ID NO: 253 - protein, 15 aa, Juglans nigra
RDRHQKIRHFREGDV

SEQ ID NO: 254 - protein, 15 aa, Juglans nigra
AFPAGVAHWCYNDGD

SEQ ID NO: 255 - protein, 15 aa, Juglans nigra
RWLQLSAERGALYSD

SEQ ID NO: 256 - protein, 15 aa, Juglans regia
DIFVIPAGHPIAITA

SEQ ID NO: 257 - protein, 15 aa, Juglans regia
GVLFPGCPETFEESQ

SEQ ID NO: 258 - protein, 15 aa, Juglans regia
VLRWLQLSAERGALY

SEQ ID NO: 259 - protein, 15 aa, Juglans regia
QDRHQKIRHFREGDI

SEQ ID NO: 260 - protein, 15 aa, Juglans regia
GLLLPQYSNAPQLVY

SEQ ID NO: 261 - protein, 15 aa, Juglans regia
AGRISTVNSHTLPVL

SEQ ID NO: 262 - protein, 15 aa, Juglans regia
PLAGRTSAIRALPEE

SEQ ID NO: 263 - protein, 15 aa, Juglans regia
AFPAGVAHWSYNDGS

SEQ ID NO: 264 - protein, 15 aa, Juglans regia
AHSVVYALRGRAEVQ

SEQ ID NO: 265 - protein, 15 aa, Juglans regia
NGLLLPQYSNAPQLV

SEQ ID NO: 266 - protein, 15 aa, Juglans regia
RWLQLSAERGALYSD

SEQ ID NO: 267 - protein, 15 aa, Lens culinaris
QRNFLAGEEDNVISQ

SEQ ID NO: 268 - protein, 15 aa, Lens culinaris
ITPEKNPQLQDLDIF

SEQ ID NO: 269 - protein, 15 aa, Lens culinaris
PGDVLVIPAGHPVAI

SEQ ID NO: 270 - protein, 15 aa, Lens culinaris
EGSLLLPNYNSRAIV

SEQ ID NO: 271 - protein, 15 aa, Lens culinaris
SLLLPNYNSRAIVIV

SEQ ID NO: 272 - protein, 15 aa, Lens culinaris
GSLLLPNYNSRAIVI

SEQ ID NO: 273 - protein, 15 aa, Lens culinaris
GFSKNILEAAFNTEY

SEQ ID NO: 274 - protein, 15 aa, Lupinus albus
QRNFLAGSEDNVIRQ

SEQ ID NO: 275 - protein, 15 aa, Lupinus albus
NQRNFLAGSEDNVIR

SEQ ID NO: 276 - protein, 15 aa, Lupinus albus
EGALLLPHYNSKAIF

SEQ ID NO: 277 - protein, 15 aa, Lupinus albus
FGINAYENQRNFLAG

SEQ ID NO: 278 - protein, 15 aa, Lupinus angustifolius
EGALLLPHYNSKAIF

SEQ ID NO: 279 - protein, 15 aa, Lupinus angustifolius
YSNKFGNFYEITPER

SEQ ID NO: 280 - protein, 15 aa, Lupinus angustifolius
NQRNFLAGSEDNVIS

SEQ ID NO: 281 - protein, 15 aa, Lupinus angustifolius
QRNFLAGSEDNVISQ

SEQ ID NO: 282 - protein, 15 aa, Lupinus angustifolius
ITPERNPQVQDLDIS

SEQ ID NO: 283 - protein, 15 aa, Lupinus angustifolius
FGINANENQRNFLAG

SEQ ID NO: 284 - protein, 15 aa, Lupinus angustifolius
GFSKNTLEATFNTRY

SEQ ID NO: 285 - protein, 15 aa, Pisum sativum
EGSLLLPNYNSRAIV

SEQ ID NO: 286 - protein, 15 aa, Pisum sativum
SLLLPNYNSRAIVIV

SEQ ID NO: 287 - protein, 15 aa, Pisum sativum
GFSKNILEAAFNTNY

SEQ ID NO: 288 - protein, 15 aa, Pisum sativum
GSLLLPNYNSRAIVI

SEQ ID NO: 289 - protein, 15 aa, Pisum sativum
PGDVFVIPAGHPVAI

SEQ ID NO: 290 - protein, 15 aa, Pisum sativum
ITPEKNQQLQDLDIF

SEQ ID NO: 291 - protein, 15 aa, Pisum sativum
ERNFLAGEEDNVISQ

SEQ ID NO: 292 - protein, 15 aa, Pisum sativum
DVFVIPAGHPVAINA

SEQ ID NO: 293 - protein, 15 aa, Pisum sativum
ITPEKKYPQLQDLDL

SEQ ID NO: 294 - protein, 15 aa, Pisum sativum
PGDVVIIPAGHPVAI

SEQ ID NO: 295 - protein, 15 aa, Pisum sativum
FSKNILEASYNTRYE

SEQ ID NO: 296 - protein, 15 aa, Pisum sativum
SNLNLLGFGINAENN

SEQ ID NO: 297 - protein, 15 aa, Pisum sativum
LRGFSKNILEASYNT

SEQ ID NO: 298 - protein, 15 aa, Pistacia vera
GQLVVVPQNFAVVKR

SEQ ID NO: 299 - protein, 15 aa, Pistacia vera
QLVVVPQNFAVVKRA

SEQ ID NO: 300 - protein, 15 aa, Pistacia vera
GQIFVVPQNFAVVKR

SEQ ID NO: 301 - protein, 15 aa, Pistacia vera
VLANAFQISREDARK

SEQ ID NO: 302 - protein, 15 aa, Pistacia vera
NLPILKWLQLSAERG

SEQ ID NO: 303 - protein, 15 aa, Pistacia vera
KWLQLSAERGVLQNN

SEQ ID NO: 304 - protein, 15 aa, Pistacia vera
LKWLQLSAERGVLQN

SEQ ID NO: 305 - protein, 15 aa, Prunus Dulcis
PILRFLRLSAERGFF

SEQ ID NO: 306 - protein, 15 aa, Prunus Dulcis
GLHLPSYSNAPQLIY

SEQ ID NO: 307 - protein, 15 aa, Prunus Dulcis
LHLPSYSNAPQLIYI

SEQ ID NO: 308 - protein, 15 aa, Prunus Dulcis
AGRTSFLRALPDEVL

SEQ ID NO: 309 - protein, 15 aa, Prunus Dulcis
QNPRKFYLAGNPENE

SEQ ID NO: 310 - protein, 15 aa, Prunus Dulcis
LAGRTSFLRALPDEV

SEQ ID NO: 311 - protein, 15 aa, Prunus Dulcis
ILRFLRLSAERGFFY

SEQ ID NO: 312 - protein, 15 aa, Prunus Dulcis
TLAGRTSFLRALPDE

SEQ ID NO: 313 - protein, 15 aa, Prunus Dulcis
NLPILRFLRLSAERG

SEQ ID NO: 314 - protein, 15 aa, Sesamum indicum
SDEILEAAFNTRRDR

SEQ ID NO: 315 - protein, 15 aa, Sesamum indicum
PLAGYTSVIRAMPLQ

SEQ ID NO: 316 - protein, 15 aa, Sesamum indicum
AGRLSAIRAMPEEVV

SEQ ID NO: 317 - protein, 15 aa, Sesamum indicum
LLLPHYNNAPQLLYV

SEQ ID NO: 318 - protein, 15 aa, Sinapis alba
LAGRTSALRALPLEV

SEQ ID NO: 319 - protein, 15 aa, Sinapis alba
STLAGRTSALRALPL

SEQ ID NO: 320 - protein, 15 aa, Sinapis alba
TLAGRTSALRALPLE

SEQ ID NO: 321 - protein, 15 aa, Sinapis alba
NNFEWISFKTNANAM

SEQ ID NO: 322 - protein, 15 aa, Vigna radiata
ITPEKNPQLRDLDMF

SEQ ID NO: 323 - protein, 15 aa, Vigna radiata
EGSLLLPHYNSKAIV

SEQ ID NO: 324 - protein, 15 aa, Vigna radiata
QRNFLAGEKDNVISE

SEQ ID NO: 325 - protein, 15 aa, Anacardium occidentale
QPNGLLLPQYSNAPQ

SEQ ID NO: 326 - protein, 15 aa, Anacardium occidentale
LLPQYSNAPQLIYVV

SEQ ID NO: 327 - protein, 15 aa, Anacardium occidentale
PNGLLLPQYSNAPQL

SEQ ID NO: 328 - protein, 15 aa, Anacardium occidentale
NINDPARADIYTPEV

SEQ ID NO: 329 - protein, 15 aa, Anacardium occidentale
FRRGDIIAIPAGVAH

SEQ ID NO: 330 - protein, 15 aa, Anacardium occidentale
NFAVVKRAREERFEW

SEQ ID NO: 331 - protein, 15 aa, Anacardium occidentale
PQNFAVVKRAREERF

SEQ ID NO: 332 - protein, 15 aa, Anacardium occidentale
FAVVKRAREERFEWI

SEQ ID NO: 333 - protein, 15 aa, Anacardium occidentale
QNFAVVKRAREERFE

SEQ ID NO: 334 - protein, 15 aa, Arachis hypogaea
GALMLPHFNSKAMVI

SEQ ID NO: 335 - protein, 15 aa, Arachis hypogaea
SSELHLLGFGINAEN

SEQ ID NO: 336 - protein, 15 aa, Arachis hypogaea
ALMLPHFNSKAMVIV

SEQ ID NO: 337 - protein, 15 aa, Arachis hypogaea
AHSIIYALRGRAHVQ

SEQ ID NO: 338 - protein, 15 aa, Bertholletia excelsa
DQNPRHFFLAGNIQR

SEQ ID NO: 339 - protein, 15 aa, Bertholletia excelsa
RGILGVLMPGCPETF

SEQ ID NO: 340 - protein, 15 aa, Bertholletia excelsa
GILGVLMPGCPETFQ

SEQ ID NO: 341 - protein, 15 aa, Carya illinoinensis
VIPAGHPIAITASQN

SEQ ID NO: 342 - protein, 15 aa, Carya illinoinensis
PAGHPIAITASQNEN

SEQ ID NO: 343 - protein, 15 aa, Carya illinoinensis
GTGRFEMACPHDVSS

SEQ ID NO: 344 - protein, 15 aa, Carya illinoinensis
TIPQNFAVVKRARDE

SEQ ID NO: 345 - protein, 15 aa, Carya illinoinensis
LLPHYSNAPQLVYIA

SEQ ID NO: 346 - protein, 15 aa, Carya illinoinensis
EPNGLLLPHYSNAPQ

SEQ ID NO: 347 - protein, 15 aa, Carya illinoinensis
QQLQCAGVAVVRRTI

SEQ ID NO: 348 - protein, 15 aa, Carya illinoinensis
GITGVLFPGCPETFE

SEQ ID NO: 349 - protein, 15 aa, Carya illinoinensis
PNGLLLPHYSNAPQL

SEQ ID NO: 350 - protein, 15 aa, Carya illinoinensis
HQQLQCAGVAVVRRT

SEQ ID NO: 351 - protein, 15 aa, Carya illinoinensis
MVSPLAGRTSAIRAL

SEQ ID NO: 352 - protein, 15 aa, Carya illinoinensis
ISTVNSHNLPILRWL

SEQ ID NO: 353 - protein, 15 aa, Carya illinoinensis
HSVVYALRGRAEVQV

SEQ ID NO: 354 - protein, 15 aa, Carya illinoinensis
NHQQLQCAGVAVVRR

SEQ ID NO: 355 - protein, 15 aa, Carya illinoinensis
NIGDPSRADIYTEEA

SEQ ID NO: 356 - protein, 15 aa, Carya illinoinensis
TGVLFPGCPETFEES

SEQ ID NO: 357 - protein, 15 aa, Carya illinoinensis
VVYALRGRAEVQVVD

SEQ ID NO: 358 - protein, 15 aa, Carya illinoinensis
WNLNAHSVVYALRGR

SEQ ID NO: 359 - protein, 15 aa, Carya illinoinensis
FQQDRHQKIRHFREG

SEQ ID NO: 360 - protein, 15 aa, Carya illinoinensis
RGITGVLFPGCPETF

SEQ ID NO: 361 - protein, 15 aa, Carya illinoinensis
VLVNAFQIPREDARR

SEQ ID NO: 362 - protein, 15 aa, Carya illinoinensis
DQNPRNFYLAGNPDD

SEQ ID NO: 363 - protein, 15 aa, Carya illinoinensis
FAVVKRARDEGFEWV

SEQ ID NO: 364 - protein, 15 aa, Carya illinoinensis
NLNAHSVVYALRGRA

SEQ ID NO: 365 - protein, 15 aa, Carya illinoinensis
WLQLSAERGALYSDA

SEQ ID NO: 366 - protein, 15 aa, Carya illinoinensis
SVVYALRGRAEVQVV

SEQ ID NO: 367 - protein, 15 aa, Carya illinoinensis
QNFAVVKRARDEGFE

SEQ ID NO: 368 - protein, 15 aa, Carya illinoinensis
RDDNGLEETICTLSL

SEQ ID NO: 369 - protein, 15 aa, Carya illinoinensis
NFAVVKRARDEGFEW

SEQ ID NO: 370 - protein, 15 aa, Carya illinoinensis
NAHSVVYALRGRAEV

SEQ ID NO: 371 - protein, 15 aa, Carya illinoinensis
SPLAGRTSAIRALPE

SEQ ID NO: 372 - protein, 15 aa, Carya illinoinensis
PQNFAVVKRARDEGF

SEQ ID NO: 373 - protein, 15 aa, Corylus avellana
LRWLQLSAERGDLQR

SEQ ID NO: 374 - protein, 15 aa, Corylus avellana
WLQLSAERGDLQREG

SEQ ID NO: 375 - protein, 15 aa, Corylus avellana
PNGLLLPQYSNAPEL

SEQ ID NO: 376 - protein, 15 aa, Corylus avellana
NAHSVVYAIRGRARV

SEQ ID NO: 377 - protein, 15 aa, Corylus avellana
DQQFQCAGVAVIRRT

SEQ ID NO: 378 - protein, 15 aa, Corylus avellana
SEQDRHQKIRHFREG

SEQ ID NO: 379 - protein, 15 aa, Corylus avellana
GITGVLFPGCPETFE

SEQ ID NO: 380 - protein, 15 aa, Corylus avellana
QDRHQKIRHFREGDI

SEQ ID NO: 381 - protein, 15 aa, Corylus avellana
QISPLAGRTSAIRAL

SEQ ID NO: 382 - protein, 15 aa, Corylus avellana
EPNGLLLPQYSNAPE

SEQ ID NO: 383 - protein, 15 aa, Corylus avellana
LLPQYSNAPELIYIE

SEQ ID NO: 384 - protein, 15 aa, Corylus avellana
QQFQCAGVAVIRRTI

SEQ ID NO: 385 - protein, 15 aa, Corylus avellana
LPVLRWLQLSAERGD

SEQ ID NO: 386 - protein, 15 aa, Corylus avellana
RGITGVLFPGCPETF

SEQ ID NO: 387 - protein, 15 aa, Corylus avellana
AHSVVYAIRGRARVQ

SEQ ID NO: 388 - protein, 15 aa, Corylus avellana
SVVYAIRGRARVQVV

SEQ ID NO: 389 - protein, 15 aa, Corylus avellana
HSVVYAIRGRARVQV

SEQ ID NO: 390 - protein, 15 aa, Corylus avellana
TLPVLRWLQLSAERG

SEQ ID NO: 391 - protein, 15 aa, Corylus avellana
TGVLFPGCPETFEDP

SEQ ID NO: 392 - protein, 15 aa, Corylus avellana
GRGRDVNGFEETICS

SEQ ID NO: 393 - protein, 15 aa, Corylus avellana
NLNAHSVVYAIRGRA

SEQ ID NO: 394 - protein, 15 aa, Corylus avellana
WNLNAHSVVYAIRGR

SEQ ID NO: 395 - protein, 15 aa, Corylus avellana
VVYAIRGRARVQVVD

SEQ ID NO: 396 - protein, 15 aa, Corylus avellana
DENPRHFYLAGNPDD

SEQ ID NO: 397 - protein, 15 aa, Corylus avellana
GFEETICSLRLRENI

SEQ ID NO: 398 - protein, 15 aa, Glycine max
FNLRSRDPIYSNKLG

SEQ ID NO: 399 - protein, 15 aa, Glycine max
FEITPEKNPQLRDLD

SEQ ID NO: 400 - protein, 15 aa, Glycine max
KFFEITPEKNPQLRD

SEQ ID NO: 401 - protein, 15 aa, Glycine max
YSNKLGKFFEITPEK

SEQ ID NO: 402 - protein, 15 aa, Glycine max
KLGKFFEITPEKNPQ

SEQ ID NO: 403 - protein, 15 aa, Glycine max
EITPEKNPQLRDLDI

SEQ ID NO: 404 - protein, 15 aa, Glycine max
LQGFSRNILEASYDT

SEQ ID NO: 405 - protein, 15 aa, Glycine max
LGKFFEITPEKNPQL

SEQ ID NO: 406 - protein, 15 aa, Glycine max
PEKNPQLRDLDIFLS

SEQ ID NO: 407 - protein, 15 aa, Glycine max
GKFFEITPEKNPQLR

SEQ ID NO: 408 - protein, 15 aa, Glycine max
PHWNLNANSVIYVTR

SEQ ID NO: 409 - protein, 15 aa, Juglans nigra
NNQQFQCAGVAVVRR

SEQ ID NO: 410 - protein, 15 aa, Juglans nigra
VLANALQIPREDARR

SEQ ID NO: 411 - protein, 15 aa, Juglans nigra
QRDRHQKIRHFREGD

SEQ ID NO: 412 - protein, 15 aa, Juglans nigra
PNGLLLPQYSNAPQL

SEQ ID NO: 413 - protein, 15 aa, Juglans nigra
LRWLQLSAERGALYS

SEQ ID NO: 414 - protein, 15 aa, Juglans nigra
LLPQYSNAPQLLYIV

SEQ ID NO: 415 - protein, 15 aa, Juglans nigra
GITGVLFPGCPETFE

SEQ ID NO: 416 - protein, 15 aa, Juglans nigra
MVSPLAGRTSAIRAL

SEQ ID NO: 417 - protein, 15 aa, Juglans nigra
HSVVYALRGRAEVQV

SEQ ID NO: 418 - protein, 15 aa, Juglans nigra
FAVVKRARNEGFEWV

SEQ ID NO: 419 - protein, 15 aa, Juglans nigra
NIGDPSRADIYTEEA

SEQ ID NO: 420 - protein, 15 aa, Juglans nigra
GLEETICTLRLRENI

SEQ ID NO: 421 - protein, 15 aa, Juglans nigra
TGVLFPGCPETFEES

SEQ ID NO: 422 - protein, 15 aa, Juglans nigra
QQFQCAGVAVVRRTI

SEQ ID NO: 423 - protein, 15 aa, Juglans nigra
VVYALRGRAEVQVVD

SEQ ID NO: 424 - protein, 15 aa, Juglans nigra
WNLNAHSVVYALRGR

SEQ ID NO: 425 - protein, 15 aa, Juglans nigra
NQQFQCAGVAVVRRT

SEQ ID NO: 426 - protein, 15 aa, Juglans nigra
RDDNGLEETICTLRL

SEQ ID NO: 427 - protein, 15 aa, Juglans nigra
RGITGVLFPGCPETF

SEQ ID NO: 428 - protein, 15 aa, Juglans nigra
LPVLRWLQLSAERGA

SEQ ID NO: 429 - protein, 15 aa, Juglans nigra
GRISTANSHTLPVLR

SEQ ID NO: 430 - protein, 15 aa, Juglans nigra
DQNPRNFYLAGNPDD

SEQ ID NO: 431 - protein, 15 aa, Juglans nigra
EPNGLLLPQYSNAPQ

SEQ ID NO: 432 - protein, 15 aa, Juglans nigra
NFAVVKRARNEGFEW

SEQ ID NO: 433 - protein, 15 aa, Juglans nigra
NLNAHSVVYALRGRA

SEQ ID NO: 434 - protein, 15 aa, Juglans nigra
QNFAVVKRARNEGFE

SEQ ID NO: 435 - protein, 15 aa, Juglans nigra
WLQLSAERGALYSDA

SEQ ID NO: 436 - protein, 15 aa, Juglans nigra
PQNFAVVKRARNEGF

SEQ ID NO: 437 - protein, 15 aa, Juglans nigra
SVVYALRGRAEVQVV

SEQ ID NO: 438 - protein, 15 aa, Juglans nigra
AHWCYNDGDTPVVAV

SEQ ID NO: 439 - protein, 15 aa, Juglans nigra
NAHSVVYALRGRAEV

SEQ ID NO: 440 - protein, 15 aa, Juglans nigra
SPLAGRTSAIRALPE

SEQ ID NO: 441 - protein, 15 aa, Juglans regia
VIPAGHPIAITASQN

SEQ ID NO: 442 - protein, 15 aa, Juglans regia
PAGHPIAITASQNEN

SEQ ID NO: 443 - protein, 15 aa, Juglans regia
AHWSYNDGSNPVVAI

SEQ ID NO: 444 - protein, 15 aa, Juglans regia
NNQQFQCAGVAVVRR

SEQ ID NO: 445 - protein, 15 aa, Juglans regia
PNGLLLPQYSNAPQL

SEQ ID NO: 446 - protein, 15 aa, Juglans regia
LRWLQLSAERGALYS

SEQ ID NO: 447 - protein, 15 aa, Juglans regia
LLPQYSNAPQLVYIA

SEQ ID NO: 448 - protein, 15 aa, Juglans regia
GITGVLFPGCPETFE

SEQ ID NO: 449 - protein, 15 aa, Juglans regia
MVSPLAGRTSAIRAL

SEQ ID NO: 450 - protein, 15 aa, Juglans regia
HSVVYALRGRAEVQV

SEQ ID NO: 451 - protein, 15 aa, Juglans regia
FAVVKRARNEGFEWV

SEQ ID NO: 452 - protein, 15 aa, Juglans regia
NIGDPSRADIYTEEA

SEQ ID NO: 453 - protein, 15 aa, Juglans regia
GLEETICTLRLRENI

SEQ ID NO: 454 - protein, 15 aa, Juglans regia
TGVLFPGCPETFEES

SEQ ID NO: 455 - protein, 15 aa, Juglans regia
QQFQCAGVAVVRRTI

SEQ ID NO: 456 - protein, 15 aa, Juglans regia
VVYALRGRAEVQVVD

SEQ ID NO: 457 - protein, 15 aa, Juglans regia
WNLNAHSVVYALRGR

SEQ ID NO: 458 - protein, 15 aa, Juglans regia
ISTVNSHTLPVLRWL

SEQ ID NO: 459 - protein, 15 aa, Juglans regia
FQQDRHQKIRHFREG

SEQ ID NO: 460 - protein, 15 aa, Juglans regia
NQQFQCAGVAVVRRT

SEQ ID NO: 461 - protein, 15 aa, Juglans regia
RDDNGLEETICTLRL

SEQ ID NO: 462 - protein, 15 aa, Juglans regia
RGITGVLFPGCPETF

SEQ ID NO: 463 - protein, 15 aa, Juglans regia
LPVLRWLQLSAERGA

SEQ ID NO: 464 - protein, 15 aa, Juglans regia
DQNPRNFYLAGNPDD

SEQ ID NO: 465 - protein, 15 aa, Juglans regia
EPNGLLLPQYSNAPQ

SEQ ID NO: 466 - protein, 15 aa, Juglans regia
NFAVVKRARNEGFEW

SEQ ID NO: 467 - protein, 15 aa, Juglans regia
NLNAHSVVYALRGRA

SEQ ID NO: 468 - protein, 15 aa, Juglans regia
QNFAVVKRARNEGFE

SEQ ID NO: 469 - protein, 15 aa, Juglans regia
WLQLSAERGALYSDA

SEQ ID NO: 470 - protein, 15 aa, Juglans regia
PQNFAVVKRARNEGF

SEQ ID NO: 471 - protein, 15 aa, Juglans regia
SVVYALRGRAEVQVV

SEQ ID NO: 472 - protein, 15 aa, Juglans regia
VLATAFQIPREDARR

SEQ ID NO: 473 - protein, 15 aa, Juglans regia
NAHSVVYALRGRAEV

SEQ ID NO: 474 - protein, 15 aa, Juglans regia
SPLAGRTSAIRALPE

SEQ ID NO: 475 - protein, 15 aa, Lens culinaris
FEITPEKNPQLQDLD

SEQ ID NO: 476 - protein, 15 aa, Lens culinaris
FGKFFEITPEKNPQL

SEQ ID NO: 477 - protein, 15 aa, Lens culinaris
KFFEITPEKNPQLQD

SEQ ID NO: 478 - protein, 15 aa, Lens culinaris
EITPEKNPQLQDLDI

SEQ ID NO: 479 - protein, 15 aa, Lens culinaris
GDVLVIPAGHPVAIN

SEQ ID NO: 480 - protein, 15 aa, Lens culinaris
PAGHPVAINASSDLN

SEQ ID NO: 481 - protein, 15 aa, Lens culinaris
KFGKFFEITPEKNPQ

SEQ ID NO: 482 - protein, 15 aa, Lens culinaris
IYSNKFGKFFEITPE

SEQ ID NO: 483 - protein, 15 aa, Lens culinaris
LSGFSKNILEAAFNT

SEQ ID NO: 484 - protein, 15 aa, Lens culinaris
VIPAGHPVAINASSD

SEQ ID NO: 485 - protein, 15 aa, Lens culinaris
DVLVIPAGHPVAINA

SEQ ID NO: 486 - protein, 15 aa, Lens culinaris
PEKNPQLQDLDIFVN

SEQ ID NO: 487 - protein, 15 aa, Lens culinaris
YSNKFGKFFEITPEK

SEQ ID NO: 488 - protein, 15 aa, Lens culinaris
FNLRSRNPIYSNKFG

SEQ ID NO: 489 - protein, 15 aa, Lupinus albus
INAYENQRNFLAGSE

SEQ ID NO: 490 - protein, 15 aa, Lupinus albus
PFNLRSNEPIYSNKY

SEQ ID NO: 491 - protein, 15 aa, Lupinus albus
SSNLRLLGFGINAYE

SEQ ID NO: 492 - protein, 15 aa, Lupinus albus
FNLRSNEPIYSNKYG

SEQ ID NO: 493 - protein, 15 aa, Lupinus albus
GPFNLRSNEPIYSNK

SEQ ID NO: 494 - protein, 15 aa, Lupinus angustifolius
GPFNLRSNESIYSNK

SEQ ID NO: 495 - protein, 15 aa, Lupinus angustifolius
PERNPQVQDLDISLT

SEQ ID NO: 496 - protein, 15 aa, Lupinus angustifolius
PFNLRSNESIYSNKF

SEQ ID NO: 497 - protein, 15 aa, Lupinus angustifolius
INANENQRNFLAGSE

SEQ ID NO: 498 - protein, 15 aa, Lupinus angustifolius
SSNLRLLGFGINANE

SEQ ID NO: 499 - protein, 15 aa, Pinus koraiensis
GEGRIEMACPHLGQE

SEQ ID NO: 500 - protein, 15 aa, Pisum sativum
FGKFFEITPEKNQQL

SEQ ID NO: 501 - protein, 15 aa, Pisum sativum
EITPEKNQQLQDLDI

SEQ ID NO: 502 - protein, 15 aa, Pisum sativum
PEKNQQLQDLDIFVN

SEQ ID NO: 503 - protein, 15 aa, Pisum sativum
IPAGHPVAINASSDL

SEQ ID NO: 504 - protein, 15 aa, Pisum sativum
SSDLNLIGFGINAEN

SEQ ID NO: 505 - protein, 15 aa, Pisum sativum
PAGHPVAINASSDLN

SEQ ID NO: 506 - protein, 15 aa, Pisum sativum
IYSNKFGKFFEITPE

SEQ ID NO: 507 - protein, 15 aa, Pisum sativum
PFNLRSRNPIYSNKF

SEQ ID NO: 508 - protein, 15 aa, Pisum sativum
VIPAGHPVAINASSD

SEQ ID NO: 509 - protein, 15 aa, Pisum sativum
GDVFVIPAGHPVAIN

SEQ ID NO: 510 - protein, 15 aa, Pisum sativum
KFFEITPEKNQQLQD

SEQ ID NO: 511 - protein, 15 aa, Pisum sativum
FEITPEKNQQLQDLD

SEQ ID NO: 512 - protein, 15 aa, Pisum sativum
YSNKFGKFFEITPEK

SEQ ID NO: 513 - protein, 15 aa, Pisum sativum
KFGKFFEITPEKNQQ

SEQ ID NO: 514 - protein, 15 aa, Pisum sativum
FEITPEKKYPQLQDL

SEQ ID NO: 515 - protein, 15 aa, Pisum sativum
GFGINAENNERNFLS

SEQ ID NO: 516 - protein, 15 aa, Pisum sativum
IPAGHPVAITASSNL

SEQ ID NO: 517 - protein, 15 aa, Pisum sativum
EITPEKKYPQLQDLD

SEQ ID NO: 518 - protein, 15 aa, Pisum sativum
EGALMLPHYNSRAIV

SEQ ID NO: 519 - protein, 15 aa, Pisum sativum
KFGKLFEITPEKKYP

SEQ ID NO: 520 - protein, 15 aa, Pisum sativum
FGINAENNERNFLSG

SEQ ID NO: 521 - protein, 15 aa, Pisum sativum
SSNLNLLGFGINAEN

SEQ ID NO: 522 - protein, 15 aa, Pisum sativum
EYSNKFGKLFEITPE

SEQ ID NO: 523 - protein, 15 aa, Pisum sativum
PEKKYPQLQDLDLFV

SEQ ID NO: 524 - protein, 15 aa, Pisum sativum
GDVVIIPAGHPVAIT

SEQ ID NO: 525 - protein, 15 aa, Pisum sativum
DVVIIPAGHPVAITA

SEQ ID NO: 526 - protein, 15 aa, Pisum sativum
GALMLPHYNSRAIVV

SEQ ID NO: 527 - protein, 15 aa, Pisum sativum
SNKFGKLFEITPEKK

SEQ ID NO: 528 - protein, 15 aa, Pisum sativum
PAGHPVAITASSNLN

SEQ ID NO: 529 - protein, 15 aa, Pisum sativum
FGKLFEITPEKKYPQ

SEQ ID NO: 530 - protein, 15 aa, Pistacia vera
VVPQNFAVVKRASSD

SEQ ID NO: 531 - protein, 15 aa, Pistacia vera
APHWNVNAHSIVYIT

SEQ ID NO: 532 - protein, 15 aa, Pistacia vera
QNFAVVKRARGQRFE

SEQ ID NO: 533 - protein, 15 aa, Pistacia vera
EGQIFVVPQNFAVVK

SEQ ID NO: 534 - protein, 15 aa, Pistacia vera
FAVVKRARGQRFEWI

SEQ ID NO: 535 - protein, 15 aa, Pistacia vera
WLQLSAERGVLQNNA

SEQ ID NO: 536 - protein, 15 aa, Pistacia vera
NFAVVKRARGQRFEW

SEQ ID NO: 537 - protein, 15 aa, Pistacia vera
PQNFAVVKRARGQRF

SEQ ID NO: 538 - protein, 15 aa, Pistacia vera
FRKGDIIALPAGVAN

SEQ ID NO: 539 - protein, 15 aa, Pistacia vera
VVPQNFAVVKRARGQ

SEQ ID NO: 540 - protein, 15 aa, Pistacia vera
QIFVVPQNFAVVKRA

SEQ ID NO: 541 - protein, 15 aa, Pistacia vera
RDNGLEETICTMKLK

SEQ ID NO: 542 - protein, 15 aa, Pistacia vera
GLEETICTMKLKENI

SEQ ID NO: 543 - protein, 15 aa, Prunus Dulcis
NVNAHSVVYVIRGNA

SEQ ID NO: 544 - protein, 15 aa, Prunus Dulcis
RISTLNSHNLPILRF

SEQ ID NO: 545 - protein, 15 aa, Prunus Dulcis
HSVVYVIRGNARVQV

SEQ ID NO: 546 - protein, 15 aa, Prunus Dulcis
GRISTLNSHNLPILR

SEQ ID NO: 547 - protein, 15 aa, Prunus Dulcis
VVYVIRGNARVQVVN

SEQ ID NO: 548 - protein, 15 aa, Prunus Dulcis
AHSVVYVIRGNARVQ

SEQ ID NO: 549 - protein, 15 aa, Prunus Dulcis
SVVYVIRGNARVQVV

SEQ ID NO: 550 - protein, 15 aa, Prunus Dulcis
WNVNAHSVVYVIRGN

SEQ ID NO: 551 - protein, 15 aa, Sesamum indicum
NQQFECAGVAAVRNV

SEQ ID NO: 552 - protein, 15 aa, Sesamum indicum
QQFECAGVAAVRNVI

SEQ ID NO: 553 - protein, 15 aa, Sinapis alba
HENIDDPARADIYKP

SEQ ID NO: 554 - protein, 15 aa, Sinapis alba
NIDDPARADIYKPNL

SEQ ID NO: 555 - protein, 15 aa, Sinapis alba
ENIDDPARADIYKPN

SEQ ID NO: 556 - protein, 15 aa, Vigna radiata
INAENNQRNFLAGEK

SEQ ID NO: 557 - protein, 15 aa, Vigna radiata
FEITPEKNPQLRDLD

SEQ ID NO: 558 - protein, 15 aa, Vigna radiata
YSNKLGRWFEITPEK

SEQ ID NO: 559 - protein, 15 aa, Vigna radiata
KLGRWFEITPEKNPQ

SEQ ID NO: 560 - protein, 15 aa, Vigna radiata
LGRWFEITPEKNPQL

SEQ ID NO: 561 - protein, 15 aa, Vigna radiata
EITPEKNPQLRDLDM

SEQ ID NO: 562 - protein, 15 aa, Vigna radiata
LQGFSKNILEASFDS

SEQ ID NO: 563 - protein, 15 aa, Anacardium occidentale
RHQKIRRFRRGDIIA

SEQ ID NO: 564 - protein, 15 aa, Anacardium occidentale
VAHWCYNEGNSPVVT

SEQ ID NO: 565 - protein, 15 aa, Anacardium occidentale
GVAHWCYNEGNSPVV

SEQ ID NO: 566 - protein, 15 aa, Anacardium occidentale
VPQNFAVVKRAREER

SEQ ID NO: 567 - protein, 15 aa, Anacardium occidentale
FEWISFKTNDRAMTS

SEQ ID NO: 568 - protein, 15 aa, Anacardium occidentale
SVLGGMPEEVLANAF

SEQ ID NO: 569 - protein, 15 aa, Anacardium occidentale
WISFKTNDRAMTSPL

SEQ ID NO: 570 - protein, 15 aa, Anacardium occidentale
RFEWISFKTNDRAMT

SEQ ID NO: 571 - protein, 15 aa, Anacardium occidentale
HQKIRRFRRGDIIAI

SEQ ID NO: 572 - protein, 15 aa, Arachis hypogaea
SELHLLGFGINAENN

SEQ ID NO: 573 - protein, 15 aa, Arachis hypogaea
SSYLQGFSRNTLEAA

SEQ ID NO: 574 - protein, 15 aa, Arachis hypogaea
GINAENNHRIFLAGD

SEQ ID NO: 575 - protein, 15 aa, Arachis hypogaea
ASSELHLLGFGINAE

SEQ ID NO: 576 - protein, 15 aa, Arachis hypogaea
VEIKEGALMLPHFNS

SEQ ID NO: 577 - protein, 15 aa, Arachis hypogaea
YLQGFSRNTLEAAFN

SEQ ID NO: 578 - protein, 15 aa, Arachis hypogaea
ALRGRAHVQVVDSNG

SEQ ID NO: 579 - protein, 15 aa, Arachis hypogaea
NAHSIIYALRGRAHV

SEQ ID NO: 580 - protein, 15 aa, Bertholletia excelsa
PAGVALWCYNDGDED

SEQ ID NO: 581 - protein, 15 aa, Carya illinoinensis
IPAGHPIAITASQNE

SEQ ID NO: 582 - protein, 15 aa, Carya illinoinensis
LREGQLLTIPQNFAV

SEQ ID NO: 583 - protein, 15 aa, Carya illinoinensis
GRTSAIRALPEEVLV

SEQ ID NO: 584 - protein, 15 aa, Carya illinoinensis
RHQKIRHFREGDIIA

SEQ ID NO: 585 - protein, 15 aa, Carya illinoinensis
LYVPHWNLNAHSVVY

SEQ ID NO: 586 - protein, 15 aa, Carya illinoinensis
SGFDAEFLADAFNVD

SEQ ID NO: 587 - protein, 15 aa, Carya illinoinensis
KIRHFREGDIIAFPA

SEQ ID NO: 588 - protein, 15 aa, Carya illinoinensis
QLQCAGVAVVRRTIE

SEQ ID NO: 589 - protein, 15 aa, Carya illinoinensis
LNAHSVVYALRGRAE

SEQ ID NO: 590 - protein, 15 aa, Carya illinoinensis
VNSHNLPILRWLQLS

SEQ ID NO: 591 - protein, 15 aa, Carya illinoinensis
VYALRGRAEVQVVDN

SEQ ID NO: 592 - protein, 15 aa, Carya illinoinensis
LADAFNVDTETARRL

SEQ ID NO: 593 - protein, 15 aa, Carya illinoinensis
RRLKFNRQESTLVRS

SEQ ID NO: 594 - protein, 15 aa, Carya illinoinensis
ETICTLSLRENIGDP

SEQ ID NO: 595 - protein, 15 aa, Carya illinoinensis
NFYLAGNPDDEFRPQ

SEQ ID NO: 596 - protein, 15 aa, Carya illinoinensis
IPQNFAVVKRARDEG

SEQ ID NO: 597 - protein, 15 aa, Carya illinoinensis
GVAHWCYNDGSSPVV

SEQ ID NO: 598 - protein, 15 aa, Carya illinoinensis
VLFPGCPETFEESQR

SEQ ID NO: 599 - protein, 15 aa, Carya illinoinensis
NVFSGFDAEFLADAF

SEQ ID NO: 600 - protein, 15 aa, Carya illinoinensis
LKFNRQESTLVRSRS

SEQ ID NO: 601 - protein, 15 aa, Carya illinoinensis
GLEETICTLSLRENI

SEQ ID NO: 602 - protein, 15 aa, Carya illinoinensis
QLLTIPQNFAVVKRA

SEQ ID NO: 603 - protein, 15 aa, Carya illinoinensis
SAIRALPEEVLVNAF

SEQ ID NO: 604 - protein, 15 aa, Carya illinoinensis
VIESWDPNHQQLQCA

SEQ ID NO: 605 - protein, 15 aa, Carya illinoinensis
EFLADAFNVDTETAR

SEQ ID NO: 606 - protein, 15 aa, Carya illinoinensis
NNVFSGFDAEFLADA

SEQ ID NO: 607 - protein, 15 aa, Carya illinoinensis
ALRGRAEVQVVDNFG

SEQ ID NO: 608 - protein, 15 aa, Carya illinoinensis
PRNFYLAGNPDDEFR

SEQ ID NO: 609 - protein, 15 aa, Carya illinoinensis
RGRGITGVLFPGCPE

SEQ ID NO: 610 - protein, 15 aa, Carya illinoinensis
NANQLDQNPRNFYLA

SEQ ID NO: 611 - protein, 15 aa, Carya illinoinensis
TICTLSLRENIGDPS

SEQ ID NO: 612 - protein, 15 aa, Carya illinoinensis
EGQLLTIPQNFAVVK

SEQ ID NO: 613 - protein, 15 aa, Carya illinoinensis
HFREGDIIAFPAGVA

SEQ ID NO: 614 - protein, 15 aa, Carya illinoinensis
GFDAEFLADAFNVDT

SEQ ID NO: 615 - protein, 15 aa, Carya illinoinensis
DRHQKIRHFREGDII

SEQ ID NO: 616 - protein, 15 aa, Carya illinoinensis
YVPHWNLNAHSVVYA

SEQ ID NO: 617 - protein, 15 aa, Carya illinoinensis
SDALYVPHWNLNAHS

SEQ ID NO: 618 - protein, 15 aa, Carya illinoinensis
DALYVPHWNLNAHSV

SEQ ID NO: 619 - protein, 15 aa, Carya illinoinensis
VAHWCYNDGSSPVVA

SEQ ID NO: 620 - protein, 15 aa, Carya illinoinensis
LQCAGVAVVRRTIEP

SEQ ID NO: 621 - protein, 15 aa, Carya illinoinensis
LLTIPQNFAVVKRAR

SEQ ID NO: 622 - protein, 15 aa, Carya illinoinensis
LTIPQNFAVVKRARD

SEQ ID NO: 623 - protein, 15 aa, Carya illinoinensis
LEETICTLSLRENIG

SEQ ID NO: 624 - protein, 15 aa, Carya illinoinensis
RENIGDPSRADIYTE

SEQ ID NO: 625 - protein, 15 aa, Carya illinoinensis
SWDPNHQQLQCAGVA

SEQ ID NO: 626 - protein, 15 aa, Carya illinoinensis
VFSGFDAEFLADAFN

SEQ ID NO: 627 - protein, 15 aa, Carya illinoinensis
LPHYSNAPQLVYIAR

SEQ ID NO: 628 - protein, 15 aa, Carya illinoinensis
RLKFNRQESTLVRSR

SEQ ID NO: 629 - protein, 15 aa, Carya illinoinensis
FSGFDAEFLADAFNV

SEQ ID NO: 630 - protein, 15 aa, Carya illinoinensis
GRGITGVLFPGCPET

SEQ ID NO: 631 - protein, 15 aa, Carya illinoinensis
ALYVPHWNLNAHSVV

SEQ ID NO: 632 - protein, 15 aa, Carya illinoinensis
LGNNVFSGFDAEFLA

SEQ ID NO: 633 - protein, 15 aa, Carya illinoinensis
HQKIRHFREGDIIAF

SEQ ID NO: 634 - protein, 15 aa, Carya illinoinensis
ITGVLFPGCPETFEE

SEQ ID NO: 635 - protein, 15 aa, Carya illinoinensis
RHFREGDIIAFPAGV

SEQ ID NO: 636 - protein, 15 aa, Carya illinoinensis
DAEFLADAFNVDTET

SEQ ID NO: 637 - protein, 15 aa, Carya illinoinensis
SHNLPILRWLQLSAE

SEQ ID NO: 638 - protein, 15 aa, Carya illinoinensis
GNNVFSGFDAEFLAD

SEQ ID NO: 639 - protein, 15 aa, Carya illinoinensis
IARGRGITGVLFPGC

SEQ ID NO: 640 - protein, 15 aa, Carya illinoinensis
DPSRADIYTEEAGRI

SEQ ID NO: 641 - protein, 15 aa, Carya illinoinensis
FDAEFLADAFNVDTE

SEQ ID NO: 642 - protein, 15 aa, Carya illinoinensis
NPRNFYLAGNPDDEF

SEQ ID NO: 643 - protein, 15 aa, Corylus avellana
GEGFFEMACPHLSSS

SEQ ID NO: 644 - protein, 15 aa, Corylus avellana
ITGVLFPGCPETFED

SEQ ID NO: 645 - protein, 15 aa, Corylus avellana
QFQCAGVAVIRRTIE

SEQ ID NO: 646 - protein, 15 aa, Corylus avellana
RHQKIRHFREGDIIA

SEQ ID NO: 647 - protein, 15 aa, Corylus avellana
SAIRALPDDVLANAF

SEQ ID NO: 648 - protein, 15 aa, Corylus avellana
NTLPVLRWLQLSAER

SEQ ID NO: 649 - protein, 15 aa, Corylus avellana
KIRHFREGDIIALPA

SEQ ID NO: 650 - protein, 15 aa, Corylus avellana
LYVPHWNLNAHSVVY

SEQ ID NO: 651 - protein, 15 aa, Corylus avellana
SGFDAEFLADAFNVD

SEQ ID NO: 652 - protein, 15 aa, Corylus avellana
LKYNRQETTLVRSSR

SEQ ID NO: 653 - protein, 15 aa, Corylus avellana
EGNNVFSGFDAEFLA

SEQ ID NO: 654 - protein, 15 aa, Corylus avellana
SWDHNDQQFQCAGVA

SEQ ID NO: 655 - protein, 15 aa, Corylus avellana
TICSLRLRENICTRS

SEQ ID NO: 656 - protein, 15 aa, Corylus avellana
QGQVLTIPQNFAVAK

SEQ ID NO: 657 - protein, 15 aa, Corylus avellana
ETICSLRLRENICTR

SEQ ID NO: 658 - protein, 15 aa, Corylus avellana
PRHFYLAGNPDDEHQ

SEQ ID NO: 659 - protein, 15 aa, Corylus avellana
RHFREGDIIALPAGV

SEQ ID NO: 660 - protein, 15 aa, Corylus avellana
EGLYVPHWNLNAHSV

SEQ ID NO: 661 - protein, 15 aa, Corylus avellana
HFYLAGNPDDEHQRQ

SEQ ID NO: 662 - protein, 15 aa, Corylus avellana
LADAFNVDVDTARRL

SEQ ID NO: 663 - protein, 15 aa, Corylus avellana
DAEFLADAFNVDVDT

SEQ ID NO: 664 - protein, 15 aa, Corylus avellana
VNSNTLPVLRWLQLS

SEQ ID NO: 665 - protein, 15 aa, Corylus avellana
TIPQNFAVAKRAESE

SEQ ID NO: 666 - protein, 15 aa, Corylus avellana
NVFSGFDAEFLADAF

SEQ ID NO: 667 - protein, 15 aa, Corylus avellana
RADIYTEQVGRINTV

SEQ ID NO: 668 - protein, 15 aa, Corylus avellana
IERGRGITGVLFPGC

SEQ ID NO: 669 - protein, 15 aa, Corylus avellana
ESWDHNDQQFQCAGV

SEQ ID NO: 670 - protein, 15 aa, Corylus avellana
NNVFSGFDAEFLADA

SEQ ID NO: 671 - protein, 15 aa, Corylus avellana
GRTSAIRALPDDVLA

SEQ ID NO: 672 - protein, 15 aa, Corylus avellana
VYAIRGRARVQVVDD

SEQ ID NO: 673 - protein, 15 aa, Corylus avellana
HFREGDIIALPAGVA

SEQ ID NO: 674 - protein, 15 aa, Corylus avellana
RGRGITGVLFPGCPE

SEQ ID NO: 675 - protein, 15 aa, Corylus avellana
GRINTVNSNTLPVLR

SEQ ID NO: 676 - protein, 15 aa, Corylus avellana
LNAHSVVYAIRGRAR

SEQ ID NO: 677 - protein, 15 aa, Corylus avellana
HQKIRHFREGDIIAL

SEQ ID NO: 678 - protein, 15 aa, Corylus avellana
FDAEFLADAFNVDVD

SEQ ID NO: 679 - protein, 15 aa, Corylus avellana
DRHQKIRHFREGDII

SEQ ID NO: 680 - protein, 15 aa, Corylus avellana
NPRHFYLAGNPDDEH

SEQ ID NO: 681 - protein, 15 aa, Corylus avellana
YVPHWNLNAHSVVYA

SEQ ID NO: 682 - protein, 15 aa, Corylus avellana
VLTIPQNFAVAKRAE

SEQ ID NO: 683 - protein, 15 aa, Corylus avellana
GVAHWCYNDGDSPVV

SEQ ID NO: 684 - protein, 15 aa, Corylus avellana
VAHWCYNDGDSPVVT

SEQ ID NO: 685 - protein, 15 aa, Corylus avellana
QVLTIPQNFAVAKRA

SEQ ID NO: 686 - protein, 15 aa, Corylus avellana
FQCAGVAVIRRTIEP

SEQ ID NO: 687 - protein, 15 aa, Corylus avellana
GFDAEFLADAFNVDV

SEQ ID NO: 688 - protein, 15 aa, Corylus avellana
FEETICSLRLRENIC

SEQ ID NO: 689 - protein, 15 aa, Corylus avellana
VFSGFDAEFLADAFN

SEQ ID NO: 690 - protein, 15 aa, Corylus avellana
FSGFDAEFLADAFNV

SEQ ID NO: 691 - protein, 15 aa, Corylus avellana
LTIPQNFAVAKRAES

SEQ ID NO: 692 - protein, 15 aa, Corylus avellana
GRGITGVLFPGCPET

SEQ ID NO: 693 - protein, 15 aa, Corylus avellana
INTVNSNTLPVLRWL

SEQ ID NO: 694 - protein, 15 aa, Corylus avellana
GLYVPHWNLNAHSVV

SEQ ID NO: 695 - protein, 15 aa, Corylus avellana
LRQGQVLTIPQNFAV

SEQ ID NO: 696 - protein, 15 aa, Corylus avellana
RLKYNRQETTLVRSS

SEQ ID NO: 697 - protein, 15 aa, Corylus avellana
GNNVFSGFDAEFLAD

SEQ ID NO: 698 - protein, 15 aa, Corylus avellana
HWCYNDGDSPVVTVS

SEQ ID NO: 699 - protein, 15 aa, Corylus avellana
RRLKYNRQETTLVRS

SEQ ID NO: 700 - protein, 15 aa, Fagopyrum esculentum
SVLRAIPVEVLANSY

SEQ ID NO: 701 - protein, 15 aa, Fagopyrum esculentum
GQILVVPQGFAVVLK

SEQ ID NO: 702 - protein, 15 aa, Fagopyrum tataricum
SVLRAIPVEVLANSY

SEQ ID NO: 703 - protein, 15 aa, Fagopyrum tataricum
GQILVVPQGFAVVLK

SEQ ID NO: 704 - protein, 15 aa, Glycine max
RNFLAGSQDNVISQI

SEQ ID NO: 705 - protein, 15 aa, Glycine max
FFEITPEKNPQLRDL

SEQ ID NO: 706 - protein, 15 aa, Glycine max
LLPHFNSKAIVILVI

SEQ ID NO: 707 - protein, 15 aa, Glycine max
QSYLQGFSRNILEAS

SEQ ID NO: 708 - protein, 15 aa, Glycine max
SYLQGFSRNILEASY

SEQ ID NO: 709 - protein, 15 aa, Glycine max
LAGSQDNVISQIPSQ

SEQ ID NO: 710 - protein, 15 aa, Glycine max
NKLGKFFEITPEKNP

SEQ ID NO: 711 - protein, 15 aa, Glycine max
PFNLRSRDPIYSNKL

SEQ ID NO: 712 - protein, 15 aa, Glycine max
YLQGFSRNILEASYD

SEQ ID NO: 713 - protein, 15 aa, Glycine max
NFLAGSQDNVISQIP

SEQ ID NO: 714 - protein, 15 aa, Glycine max
FLAGSQDNVISQIPS

SEQ ID NO: 715 - protein, 15 aa, Glycine max
LGVAIPGCPETFEEP

SEQ ID NO: 716 - protein, 15 aa, Glycine max
QLQDSHQKIRHFNEG

SEQ ID NO: 717 - protein, 15 aa, Glycine max
LQDSHQKIRHFNEGD

SEQ ID NO: 718 - protein, 15 aa, Juglans nigra
LREGQLLTIPQNFAV

SEQ ID NO: 719 - protein, 15 aa, Juglans nigra
KIRHFREGDVIAFPA

SEQ ID NO: 720 - protein, 15 aa, Juglans nigra
VFSGFDADFLADAFN

SEQ ID NO: 721 - protein, 15 aa, Juglans nigra
LKFNRQESTLVRSRP

SEQ ID NO: 722 - protein, 15 aa, Juglans nigra
LYVPHWNLNAHSVVY

SEQ ID NO: 723 - protein, 15 aa, Juglans nigra
LNAHSVVYALRGRAE

SEQ ID NO: 724 - protein, 15 aa, Juglans nigra
SGFDADFLADAFNVD

SEQ ID NO: 725 - protein, 15 aa, Juglans nigra
SAIRALPEEVLANAL

SEQ ID NO: 726 - protein, 15 aa, Juglans nigra
LPQYSNAPQLLYIVK

SEQ ID NO: 727 - protein, 15 aa, Juglans nigra
VYALRGRAEVQVVDN

SEQ ID NO: 728 - protein, 15 aa, Juglans nigra
LADAFNVDTETARRL

SEQ ID NO: 729 - protein, 15 aa, Juglans nigra
QFQCAGVAVVRRTIE

SEQ ID NO: 730 - protein, 15 aa, Juglans nigra
RRLKFNRQESTLVRS

SEQ ID NO: 731 - protein, 15 aa, Juglans nigra
GRTSAIRALPEEVLA

SEQ ID NO: 732 - protein, 15 aa, Juglans nigra
IPQNFAVVKRARNEG

SEQ ID NO: 733 - protein, 15 aa, Juglans nigra
RHFREGDVIAFPAGV

SEQ ID NO: 734 - protein, 15 aa, Juglans nigra
NFYLAGNPDDEFRPQ

SEQ ID NO: 735 - protein, 15 aa, Juglans nigra
VIESWDPNNQQFQCA

SEQ ID NO: 736 - protein, 15 aa, Juglans nigra
TICTLRLRENIGDPS

SEQ ID NO: 737 - protein, 15 aa, Juglans nigra
NNVFSGFDADFLADA

SEQ ID NO: 738 - protein, 15 aa, Juglans nigra
HFREGDVIAFPAGVA

SEQ ID NO: 739 - protein, 15 aa, Juglans nigra
QLLTIPQNFAVVKRA

SEQ ID NO: 740 - protein, 15 aa, Juglans nigra
GNNVFSGFDADFLAD

SEQ ID NO: 741 - protein, 15 aa, Juglans nigra
ALRGRAEVQVVDNFG

SEQ ID NO: 742 - protein, 15 aa, Juglans nigra
LTIPQNFAVVKRARN

SEQ ID NO: 743 - protein, 15 aa, Juglans nigra
PRNFYLAGNPDDEFR

SEQ ID NO: 744 - protein, 15 aa, Juglans nigra
NANQLDQNPRNFYLA

SEQ ID NO: 745 - protein, 15 aa, Juglans nigra
ISTANSHTLPVLRWL

SEQ ID NO: 746 - protein, 15 aa, Juglans nigra
EGQLLTIPQNFAVVK

SEQ ID NO: 747 - protein, 15 aa, Juglans nigra
FQCAGVAVVRRTIEP

SEQ ID NO: 748 - protein, 15 aa, Juglans nigra
FDADFLADAFNVDTE

SEQ ID NO: 749 - protein, 15 aa, Juglans nigra
DADFLADAFNVDTET

SEQ ID NO: 750 - protein, 15 aa, Juglans nigra
YVPHWNLNAHSVVYA

SEQ ID NO: 751 - protein, 15 aa, Juglans nigra
SDALYVPHWNLNAHS

SEQ ID NO: 752 - protein, 15 aa, Juglans nigra
DALYVPHWNLNAHSV

SEQ ID NO: 753 - protein, 15 aa, Juglans nigra
ANSHTLPVLRWLQLS

SEQ ID NO: 754 - protein, 15 aa, Juglans nigra
LLTIPQNFAVVKRAR

SEQ ID NO: 755 - protein, 15 aa, Juglans nigra
SWDPNNQQFQCAGVA

SEQ ID NO: 756 - protein, 15 aa, Juglans nigra
RENIGDPSRADIYTE

SEQ ID NO: 757 - protein, 15 aa, Juglans nigra
RLKFNRQESTLVRSR

SEQ ID NO: 758 - protein, 15 aa, Juglans nigra
NVFSGFDADFLADAF

SEQ ID NO: 759 - protein, 15 aa, Juglans nigra
GRGITGVLFPGCPET

SEQ ID NO: 760 - protein, 15 aa, Juglans nigra
RISTANSHTLPVLRW

SEQ ID NO: 761 - protein, 15 aa, Juglans nigra
ALYVPHWNLNAHSVV

SEQ ID NO: 762 - protein, 15 aa, Juglans nigra
GFDADFLADAFNVDT

SEQ ID NO: 763 - protein, 15 aa, Juglans nigra
IVKGRGITGVLFPGC

SEQ ID NO: 764 - protein, 15 aa, Juglans nigra
ETICTLRLRENIGDP

SEQ ID NO: 765 - protein, 15 aa, Juglans nigra
ITGVLFPGCPETFEE

SEQ ID NO: 766 - protein, 15 aa, Juglans nigra
SGNNVFSGFDADFLA

SEQ ID NO: 767 - protein, 15 aa, Juglans nigra
FSGFDADFLADAFNV

SEQ ID NO: 768 - protein, 15 aa, Juglans nigra
LEETICTLRLRENIG

SEQ ID NO: 769 - protein, 15 aa, Juglans nigra
VLFPGCPETFEESQQ

SEQ ID NO: 770 - protein, 15 aa, Juglans nigra
DPSRADIYTEEAGRI

SEQ ID NO: 771 - protein, 15 aa, Juglans nigra
NPRNFYLAGNPDDEF

SEQ ID NO: 772 - protein, 15 aa, Juglans regia
IPAGHPIAITASQNE

SEQ ID NO: 773 - protein, 15 aa, Juglans regia
GTGRYEMACPHVSSQ

SEQ ID NO: 774 - protein, 15 aa, Juglans regia
LGNNVFSGFDADFLA

SEQ ID NO: 775 - protein, 15 aa, Juglans regia
LREGQLLTIPQNFAV

SEQ ID NO: 776 - protein, 15 aa, Juglans regia
VFSGFDADFLADAFN

SEQ ID NO: 777 - protein, 15 aa, Juglans regia
RHQKIRHFREGDIIA

SEQ ID NO: 778 - protein, 15 aa, Juglans regia
LKFNRQESTLVRSRP

SEQ ID NO: 779 - protein, 15 aa, Juglans regia
LYVPHWNLNAHSVVY

SEQ ID NO: 780 - protein, 15 aa, Juglans regia
KIRHFREGDIIAFPA

SEQ ID NO: 781 - protein, 15 aa, Juglans regia
LNAHSVVYALRGRAE

SEQ ID NO: 782 - protein, 15 aa, Juglans regia
SGFDADFLADAFNVD

SEQ ID NO: 783 - protein, 15 aa, Juglans regia
VYALRGRAEVQVVDN

SEQ ID NO: 784 - protein, 15 aa, Juglans regia
LADAFNVDTETARRL

SEQ ID NO: 785 - protein, 15 aa, Juglans regia
QFQCAGVAVVRRTIE

SEQ ID NO: 786 - protein, 15 aa, Juglans regia
RRLKFNRQESTLVRS

SEQ ID NO: 787 - protein, 15 aa, Juglans regia
GRTSAIRALPEEVLA

SEQ ID NO: 788 - protein, 15 aa, Juglans regia
SAIRALPEEVLATAF

SEQ ID NO: 789 - protein, 15 aa, Juglans regia
IPQNFAVVKRARNEG

SEQ ID NO: 790 - protein, 15 aa, Juglans regia
NFYLAGNPDDEFRPQ

SEQ ID NO: 791 - protein, 15 aa, Juglans regia
VIESWDPNNQQFQCA

SEQ ID NO: 792 - protein, 15 aa, Juglans regia
LPQYSNAPQLVYIAR

SEQ ID NO: 793 - protein, 15 aa, Juglans regia
TICTLRLRENIGDPS

SEQ ID NO: 794 - protein, 15 aa, Juglans regia
VLFPGCPETFEESQR

SEQ ID NO: 795 - protein, 15 aa, Juglans regia
VNSHTLPVLRWLQLS

SEQ ID NO: 796 - protein, 15 aa, Juglans regia
NNVFSGFDADFLADA

SEQ ID NO: 797 - protein, 15 aa, Juglans regia
QLLTIPQNFAVVKRA

SEQ ID NO: 798 - protein, 15 aa, Juglans regia
GNNVFSGFDADFLAD

SEQ ID NO: 799 - protein, 15 aa, Juglans regia
ALRGRAEVQVVDNFG

SEQ ID NO: 800 - protein, 15 aa, Juglans regia
LTIPQNFAVVKRARN

SEQ ID NO: 801 - protein, 15 aa, Juglans regia
PRNFYLAGNPDDEFR

SEQ ID NO: 802 - protein, 15 aa, Juglans regia
RGRGITGVLFPGCPE

SEQ ID NO: 803 - protein, 15 aa, Juglans regia
NANQLDQNPRNFYLA

SEQ ID NO: 804 - protein, 15 aa, Juglans regia
EGQLLTIPQNFAVVK

SEQ ID NO: 805 - protein, 15 aa, Juglans regia
FQCAGVAVVRRTIEP

SEQ ID NO: 806 - protein, 15 aa, Juglans regia
HFREGDIIAFPAGVA

SEQ ID NO: 807 - protein, 15 aa, Juglans regia
FDADFLADAFNVDTE

SEQ ID NO: 808 - protein, 15 aa, Juglans regia
DADFLADAFNVDTET

SEQ ID NO: 809 - protein, 15 aa, Juglans regia
DRHQKIRHFREGDII

SEQ ID NO: 810 - protein, 15 aa, Juglans regia
YVPHWNLNAHSVVYA

SEQ ID NO: 811 - protein, 15 aa, Juglans regia
SDALYVPHWNLNAHS

SEQ ID NO: 812 - protein, 15 aa, Juglans regia
DALYVPHWNLNAHSV

SEQ ID NO: 813 - protein, 15 aa, Juglans regia
LLTIPQNFAVVKRAR

SEQ ID NO: 814 - protein, 15 aa, Juglans regia
SWDPNNQQFQCAGVA

SEQ ID NO: 815 - protein, 15 aa, Juglans regia
RENIGDPSRADIYTE

SEQ ID NO: 816 - protein, 15 aa, Juglans regia
STVNSHTLPVLRWLQ

SEQ ID NO: 817 - protein, 15 aa, Juglans regia
RLKFNRQESTLVRSR

SEQ ID NO: 818 - protein, 15 aa, Juglans regia
NVFSGFDADFLADAF

SEQ ID NO: 819 - protein, 15 aa, Juglans regia
GRGITGVLFPGCPET

SEQ ID NO: 820 - protein, 15 aa, Juglans regia
ALYVPHWNLNAHSVV

SEQ ID NO: 821 - protein, 15 aa, Juglans regia
GFDADFLADAFNVDT

SEQ ID NO: 822 - protein, 15 aa, Juglans regia
ETICTLRLRENIGDP

SEQ ID NO: 823 - protein, 15 aa, Juglans regia
HQKIRHFREGDIIAF

SEQ ID NO: 824 - protein, 15 aa, Juglans regia
ITGVLFPGCPETFEE

SEQ ID NO: 825 - protein, 15 aa, Juglans regia
RHFREGDIIAFPAGV

SEQ ID NO: 826 - protein, 15 aa, Juglans regia
FSGFDADFLADAFNV

SEQ ID NO: 827 - protein, 15 aa, Juglans regia
LEETICTLRLRENIG

SEQ ID NO: 828 - protein, 15 aa, Juglans regia
IARGRGITGVLFPGC

SEQ ID NO: 829 - protein, 15 aa, Juglans regia
DPSRADIYTEEAGRI

SEQ ID NO: 830 - protein, 15 aa, Juglans regia
NPRNFYLAGNPDDEF

SEQ ID NO: 831 - protein, 15 aa, Lens culinaris
GKFFEITPEKNPQLQ

SEQ ID NO: 832 - protein, 15 aa, Lens culinaris
NKFGKFFEITPEKNP

SEQ ID NO: 833 - protein, 15 aa, Lens culinaris
NFLAGEEDNVISQIQ

SEQ ID NO: 834 - protein, 15 aa, Lens culinaris
PFNLRSRNPIYSNKF

SEQ ID NO: 835 - protein, 15 aa, Lens culinaris
FLAGEEDNVISQIQR

SEQ ID NO: 836 - protein, 15 aa, Lens culinaris
FFEITPEKNPQLQDL

SEQ ID NO: 837 - protein, 15 aa, Lens culinaris
RNFLAGEEDNVISQI

SEQ ID NO: 838 - protein, 15 aa, Lens culinaris
LAGEEDNVISQIQRP

SEQ ID NO: 839 - protein, 15 aa, Lens culinaris
GFGINAKNNQRNFLA

SEQ ID NO: 840 - protein, 15 aa, Lupinus albus
ASSNLRLLGFGINAY

SEQ ID NO: 841 - protein, 15 aa, Lupinus albus
LLPHYNSKAIFIVVV

SEQ ID NO: 842 - protein, 15 aa, Lupinus albus
INEGALLLPHYNSKA

SEQ ID NO: 843 - protein, 15 aa, Lupinus albus
RNFLAGSEDNVIRQL

SEQ ID NO: 844 - protein, 15 aa, Lupinus albus
SNLRLLGFGINAYEN

SEQ ID NO: 845 - protein, 15 aa, Lupinus albus
SGPFNLRSNEPIYSN

SEQ ID NO: 846 - protein, 15 aa, Lupinus angustifolius
RNFLAGSEDNVISQL

SEQ ID NO: 847 - protein, 15 aa, Lupinus angustifolius
LLPHYNSKAIFIVVV

SEQ ID NO: 848 - protein, 15 aa, Lupinus angustifolius
INEGALLLPHYNSKA

SEQ ID NO: 849 - protein, 15 aa, Lupinus angustifolius
FLAGSEDNVISQLDR

SEQ ID NO: 850 - protein, 15 aa, Lupinus angustifolius
ASSNLRLLGFGINAN

SEQ ID NO: 851 - protein, 15 aa, Lupinus angustifolius
SGPFNLRSNESIYSN

SEQ ID NO: 852 - protein, 15 aa, Lupinus angustifolius
LAGSEDNVISQLDRE

SEQ ID NO: 853 - protein, 15 aa, Lupinus angustifolius
NFLAGSEDNVISQLD

SEQ ID NO: 854 - protein, 15 aa, Lupinus angustifolius
SNLRLLGFGINANEN

SEQ ID NO: 855 - protein, 15 aa, Pisum sativum
SGFSKNILEAAFNTN

SEQ ID NO: 856 - protein, 15 aa, Pisum sativum
GKFFEITPEKNQQLQ

SEQ ID NO: 857 - protein, 15 aa, Pisum sativum
FFEITPEKNQQLQDL

SEQ ID NO: 858 - protein, 15 aa, Pisum sativum
NKFGKFFEITPEKNQ

SEQ ID NO: 859 - protein, 15 aa, Pisum sativum
GFGINAENNERNFLA

SEQ ID NO: 860 - protein, 15 aa, Pisum sativum
GPFNLRSRNPIYSNK

SEQ ID NO: 861 - protein, 15 aa, Pisum sativum
FNLRSRNPIYSNKFG

SEQ ID NO: 862 - protein, 15 aa, Pisum sativum
NKFGKLFEITPEKKY

SEQ ID NO: 863 - protein, 15 aa, Pisum sativum
GKLFEITPEKKYPQL

SEQ ID NO: 864 - protein, 15 aa, Pisum sativum
VEINEGALMLPHYNS

SEQ ID NO: 865 - protein, 15 aa, Pisum sativum
NQYLRGFSKNILEAS

SEQ ID NO: 866 - protein, 15 aa, Pisum sativum
KLFEITPEKKYPQLQ

SEQ ID NO: 867 - protein, 15 aa, Pisum sativum
LSGSDDNVISQIENP

SEQ ID NO: 868 - protein, 15 aa, Pisum sativum
QYLRGFSKNILEASY

SEQ ID NO: 869 - protein, 15 aa, Pisum sativum
NLNLLGFGINAENNE

SEQ ID NO: 870 - protein, 15 aa, Pisum sativum
IIPAGHPVAITASSN

SEQ ID NO: 871 - protein, 15 aa, Pisum sativum
NFLSGSDDNVISQIE

SEQ ID NO: 872 - protein, 15 aa, Pisum sativum
FLSGSDDNVISQIEN

SEQ ID NO: 873 - protein, 15 aa, Pistacia vera
WISFKTNDRAMISPL

SEQ ID NO: 874 - protein, 15 aa, Pistacia vera
VANWCYNEGNSPVVT

SEQ ID NO: 875 - protein, 15 aa, Pistacia vera
FEWISFKTNDRAMIS

SEQ ID NO: 876 - protein, 15 aa, Pistacia vera
GVANWCYNEGNSPVV

SEQ ID NO: 877 - protein, 15 aa, Pistacia vera
RFEWISFKTNDRAMI

SEQ ID NO: 878 - protein, 15 aa, Pistacia vera
QRFEWISFKTNDRAM

SEQ ID NO: 879 - protein, 15 aa, Pistacia vera
SVLRAMPEEVLANAF

SEQ ID NO: 880 - protein, 15 aa, Pistacia vera
VPQNFAVVKRARGQR

SEQ ID NO: 881 - protein, 15 aa, Pistacia vera
TSVLRAMPEEVLANA

SEQ ID NO: 882 - protein, 15 aa, Pistacia vera
ANWCYNEGNSPVVTV

SEQ ID NO: 883 - protein, 15 aa, Prunus Dulcis
EQQGSGNNVFSGFNT

SEQ ID NO: 884 - protein, 15 aa, Prunus Dulcis
MANGLEETFCSLRLK

SEQ ID NO: 885 - protein, 15 aa, Prunus Dulcis
PSYSNAPQLIYIVQG

SEQ ID NO: 886 - protein, 15 aa, Sesamum indicum
LPVLSWLRLSAEKGV

SEQ ID NO: 887 - protein, 15 aa, Sesamum indicum
WISFKTNDNAMTSQL

SEQ ID NO: 888 - protein, 15 aa, Sesamum indicum
LEWISFKTNDNAMTS

SEQ ID NO: 889 - protein, 15 aa, Sinapis alba
FEWISFKTNANAMIS

SEQ ID NO: 890 - protein, 15 aa, Sinapis alba
WISFKTNANAMISTL

SEQ ID NO: 891 - protein, 15 aa, Sinapis alba
EWISFKTNANAMIST

SEQ ID NO: 892 - protein, 15 aa, Vigna radiata
RWFEITPEKNPQLRD

SEQ ID NO: 893 - protein, 15 aa, Vigna radiata
GRWFEITPEKNPQLR

SEQ ID NO: 894 - protein, 15 aa, Vigna radiata
QSYLQGFSKNILEAS

SEQ ID NO: 895 - protein, 15 aa, Vigna radiata
SYLQGFSKNILEASF

SEQ ID NO: 896 - protein, 15 aa, Vigna radiata
LLPHYNSKAIVILVI

SEQ ID NO: 897 - protein, 15 aa, Vigna radiata
WFEITPEKNPQLRDL

SEQ ID NO: 898 - protein, 15 aa, Anacardium occidentale
KQCKHQCKVQRQYDE

SEQ ID NO: 899 - protein, 15 aa, Anacardium occidentale
ENPESFYRAFSWEIL

SEQ ID NO: 900 - protein, 15 aa, Anacardium occidentale
ESFYRAFSWEILEAA

SEQ ID NO: 901 - protein, 15 aa, Anacardium occidentale
QCKHQCKVQRQYDEQ

SEQ ID NO: 902 - protein, 15 aa, Anacardium occidentale
RAFSWEILEAALKTS

SEQ ID NO: 903 - protein, 15 aa, Anacardium occidentale
NPESFYRAFSWEILE

SEQ ID NO: 904 - protein, 15 aa, Anacardium occidentale
GENPESFYRAFSWEI

SEQ ID NO: 905 - protein, 15 aa, Anacardium occidentale
YRAFSWEILEAALKT

SEQ ID NO: 906 - protein, 15 aa, Anacardium occidentale
FYRAFSWEILEAALK

SEQ ID NO: 907 - protein, 15 aa, Anacardium occidentale
PESFYRAFSWEILEA

SEQ ID NO: 908 - protein, 15 aa, Anacardium occidentale
PGGENPESFYRAFSW

SEQ ID NO: 909 - protein, 15 aa, Anacardium occidentale
SFYRAFSWEILEAAL

SEQ ID NO: 910 - protein, 15 aa, Anacardium occidentale
AFSWEILEAALKTSK

SEQ ID NO: 911 - protein, 15 aa, Anacardium occidentale
QKIRRFRRGDIIAIP

SEQ ID NO: 912 - protein, 15 aa, Anacardium occidentale
PAGVAHWCYNEGNSP

SEQ ID NO: 913 - protein, 15 aa, Anacardium occidentale
LVVPQNFAVVKRARE

SEQ ID NO: 914 - protein, 15 aa, Anacardium occidentale
SLNLPILKWLQLSVE

SEQ ID NO: 915 - protein, 15 aa, Anacardium occidentale
SFKTNDRAMTSPLAG

SEQ ID NO: 916 - protein, 15 aa, Anacardium occidentale
ISREDARKIKFNNQQ

SEQ ID NO: 917 - protein, 15 aa, Anacardium occidentale
MLVVPQNFAVVKRAR

SEQ ID NO: 918 - protein, 15 aa, Anacardium occidentale
LKWLQLSVEKGVLYK

SEQ ID NO: 919 - protein, 15 aa, Anacardium occidentale
HWCYNEGNSPVVTVT

SEQ ID NO: 920 - protein, 15 aa, Anacardium occidentale
ILKWLQLSVEKGVLY

SEQ ID NO: 921 - protein, 15 aa, Anacardium occidentale
EGQMLVVPQNFAVVK

SEQ ID NO: 922 - protein, 15 aa, Anacardium occidentale
ISFKTNDRAMTSPLA

SEQ ID NO: 923 - protein, 15 aa, Arachis hypogaea
NTLVLPKHADADNIL

SEQ ID NO: 924 - protein, 15 aa, Bertholletia excelsa
PRAGRLTTVNSLKVP

SEQ ID NO: 925 - protein, 15 aa, Bertholletia excelsa
VPQNFVVVKQAGSRG

SEQ ID NO: 926 - protein, 15 aa, Bertholletia excelsa
DLNQLDQNPRHFFLA

SEQ ID NO: 927 - protein, 15 aa, Carya illinoinensis
LEREAKELSFNMPRE

SEQ ID NO: 928 - protein, 15 aa, Carya illinoinensis
EREAKELSFNMPREE

SEQ ID NO: 929 - protein, 15 aa, Carya illinoinensis
VEGTGRFEMACPHDV

SEQ ID NO: 930 - protein, 15 aa, Carya illinoinensis
GDIFVIPAGHPIAIT

SEQ ID NO: 931 - protein, 15 aa, Carya illinoinensis
VVEGTGRFEMACPHD

SEQ ID NO: 932 - protein, 15 aa, Carya illinoinensis
RGIENYRVVILEANP

SEQ ID NO: 933 - protein, 15 aa, Carya illinoinensis
IENYRVVILEANPNT

SEQ ID NO: 934 - protein, 15 aa, Carya illinoinensis
LRGIENYRVVILEAN

SEQ ID NO: 935 - protein, 15 aa, Carya illinoinensis
TERTELLRGIENYRV

SEQ ID NO: 936 - protein, 15 aa, Carya illinoinensis
LLRGIENYRVVILEA

SEQ ID NO: 937 - protein, 15 aa, Carya illinoinensis
RGDIFVIPAGHPIAI

SEQ ID NO: 938 - protein, 15 aa, Carya illinoinensis
ELLRGIENYRVVILE

SEQ ID NO: 939 - protein, 15 aa, Carya illinoinensis
GKNNQRNFLAGQNNI

SEQ ID NO: 940 - protein, 15 aa, Carya illinoinensis
RTELLRGIENYRVVI

SEQ ID NO: 941 - protein, 15 aa, Carya illinoinensis
QLEREAKELSFNMPR

SEQ ID NO: 942 - protein, 15 aa, Carya illinoinensis
TELLRGIENYRVVIL

SEQ ID NO: 943 - protein, 15 aa, Carya illinoinensis
ERTELLRGIENYRVV

SEQ ID NO: 944 - protein, 15 aa, Carya illinoinensis
GSIVRVEGRQLQVIR

SEQ ID NO: 945 - protein, 15 aa, Carya illinoinensis
RGRAEVQVVDNFGQT

SEQ ID NO: 946 - protein, 15 aa, Carya illinoinensis
VEGRQLQVIRPRWSR

SEQ ID NO: 947 - protein, 15 aa, Carya illinoinensis
QRDLGNNVFSGFDAE

SEQ ID NO: 948 - protein, 15 aa, Carya illinoinensis
GQQEYEQHRRQQQHQ

SEQ ID NO: 949 - protein, 15 aa, Carya illinoinensis
QLSAERGALYSDALY

SEQ ID NO: 950 - protein, 15 aa, Carya illinoinensis
LQLSAERGALYSDAL

SEQ ID NO: 951 - protein, 15 aa, Carya illinoinensis
VKRARDEGFEWVSFK

SEQ ID NO: 952 - protein, 15 aa, Carya illinoinensis
RDEGFEWVSFKTNEN

SEQ ID NO: 953 - protein, 15 aa, Carya illinoinensis
LYSDALYVPHWNLNA

SEQ ID NO: 954 - protein, 15 aa, Carya illinoinensis
PEEVLVNAFQIPRED

SEQ ID NO: 955 - protein, 15 aa, Carya illinoinensis
IEAEAGVIESWDPNH

SEQ ID NO: 956 - protein, 15 aa, Carya illinoinensis
VNAFQIPREDARRLK

SEQ ID NO: 957 - protein, 15 aa, Carya illinoinensis
NNANQLDQNPRNFYL

SEQ ID NO: 958 - protein, 15 aa, Carya illinoinensis
KRARDEGFEWVSFKT

SEQ ID NO: 959 - protein, 15 aa, Carya illinoinensis
NENAMVSPLAGRTSA

SEQ ID NO: 960 - protein, 15 aa, Carya illinoinensis
EAGVIESWDPNHQQL

SEQ ID NO: 961 - protein, 15 aa, Carya illinoinensis
FRPQGQQEYEQHRRQ

SEQ ID NO: 962 - protein, 15 aa, Carya illinoinensis
FQIPREDARRLKFNR

SEQ ID NO: 963 - protein, 15 aa, Carya illinoinensis
RGGRDDNGLEETICT

SEQ ID NO: 964 - protein, 15 aa, Carya illinoinensis
QLQVIRPRWSREEQE

SEQ ID NO: 965 - protein, 15 aa, Carya illinoinensis
SIVRVEGRQLQVIRP

SEQ ID NO: 966 - protein, 15 aa, Carya illinoinensis
EGRQLQVIRPRWSRE

SEQ ID NO: 967 - protein, 15 aa, Carya illinoinensis
ARRLKFNRQESTLVR

SEQ ID NO: 968 - protein, 15 aa, Carya illinoinensis
FYLAGNPDDEFRPQG

SEQ ID NO: 969 - protein, 15 aa, Carya illinoinensis
AFQIPREDARRLKFN

SEQ ID NO: 970 - protein, 15 aa, Carya illinoinensis
HRGSIVRVEGRQLQV

SEQ ID NO: 971 - protein, 15 aa, Carya illinoinensis
YLAGNPDDEFRPQGQ

SEQ ID NO: 972 - protein, 15 aa, Carya illinoinensis
VYIARGRGITGVLFP

SEQ ID NO: 973 - protein, 15 aa, Carya illinoinensis
LPEEVLVNAFQIPRE

SEQ ID NO: 974 - protein, 15 aa, Carya illinoinensis
DNGLEETICTLSLRE

SEQ ID NO: 975 - protein, 15 aa, Carya illinoinensis
LAGNPDDEFRPQGQQ

SEQ ID NO: 976 - protein, 15 aa, Carya illinoinensis
AGNPDDEFRPQGQQE

SEQ ID NO: 977 - protein, 15 aa, Carya illinoinensis
PQGQQEYEQHRRQQQ

SEQ ID NO: 978 - protein, 15 aa, Carya illinoinensis
PILLSIYLCLIIVAL

SEQ ID NO: 979 - protein, 15 aa, Carya illinoinensis
ICTLSLRENIGDPSR

SEQ ID NO: 980 - protein, 15 aa, Carya illinoinensis
ALYSDALYVPHWNLN

SEQ ID NO: 981 - protein, 15 aa, Carya illinoinensis
THNNANQLDQNPRNF

SEQ ID NO: 982 - protein, 15 aa, Carya illinoinensis
RPQGQQEYEQHRRQQ

SEQ ID NO: 983 - protein, 15 aa, Carya illinoinensis
AEAGVIESWDPNHQQ

SEQ ID NO: 984 - protein, 15 aa, Carya illinoinensis
STVNSHNLPILRWLQ

SEQ ID NO: 985 - protein, 15 aa, Carya illinoinensis
RARDEGFEWVSFKTN

SEQ ID NO: 986 - protein, 15 aa, Carya illinoinensis
RGSIVRVEGRQLQVI

SEQ ID NO: 987 - protein, 15 aa, Carya illinoinensis
QKIRHFREGDIIAFP

SEQ ID NO: 988 - protein, 15 aa, Carya illinoinensis
YIARGRGITGVLFPG

SEQ ID NO: 989 - protein, 15 aa, Carya illinoinensis
IVRVEGRQLQVIRPR

SEQ ID NO: 990 - protein, 15 aa, Carya illinoinensis
KFNRQESTLVRSRSR

SEQ ID NO: 991 - protein, 15 aa, Carya illinoinensis
GRQLQVIRPRWSREE

SEQ ID NO: 992 - protein, 15 aa, Carya illinoinensis
RVEGRQLQVIRPRWS

SEQ ID NO: 993 - protein, 15 aa, Carya illinoinensis
DARRLKFNRQESTLV

SEQ ID NO: 994 - protein, 15 aa, Carya illinoinensis
FEWVSFKTNENAMVS

SEQ ID NO: 995 - protein, 15 aa, Carya illinoinensis
WVSFKTNENAMVSPL

SEQ ID NO: 996 - protein, 15 aa, Carya illinoinensis
RRGGRDDNGLEETIC

SEQ ID NO: 997 - protein, 15 aa, Carya illinoinensis
GQLLTIPQNFAVVKR

SEQ ID NO: 998 - protein, 15 aa, Carya illinoinensis
AVVKRARDEGFEWVS

SEQ ID NO: 999 - protein, 15 aa, Carya illinoinensis
AIRALPEEVLVNAFQ

SEQ ID NO: 1000 - protein, 15 aa, Carya illinoinensis
EFRPQGQQEYEQHRR

SEQ ID NO: 1001 - protein, 15 aa, Carya illinoinensis
QVIRPRWSREEQEHE

SEQ ID NO: 1002 - protein, 15 aa, Carya illinoinensis
NAFQIPREDARRLKF

SEQ ID NO: 1003 - protein, 15 aa, Carya illinoinensis
RQLQVIRPRWSREEQ

SEQ ID NO: 1004 - protein, 15 aa, Carya illinoinensis
RESESERRQSRRGGR

SEQ ID NO: 1005 - protein, 15 aa, Carya illinoinensis
IPREDARRLKFNRQE

SEQ ID NO: 1006 - protein, 15 aa, Carya illinoinensis
NDHRGSIVRVEGRQL

SEQ ID NO: 1007 - protein, 15 aa, Carya illinoinensis
SERRQSRRGGRDDNG

SEQ ID NO: 1008 - protein, 15 aa, Carya illinoinensis
VSFKTNENAMVSPLA

SEQ ID NO: 1009 - protein, 15 aa, Corylus avellana
ESFYRAFSWEVLEAA

SEQ ID NO: 1010 - protein, 15 aa, Corylus avellana
GGEDPESFYRAFSWE

SEQ ID NO: 1011 - protein, 15 aa, Corylus avellana
EDPESFYRAFSWEVL

SEQ ID NO: 1012 - protein, 15 aa, Corylus avellana
FYRAFSWEVLEAALK

SEQ ID NO: 1013 - protein, 15 aa, Corylus avellana
RAFSWEVLEAALKVR

SEQ ID NO: 1014 - protein, 15 aa, Corylus avellana
YRAFSWEVLEAALKV

SEQ ID NO: 1015 - protein, 15 aa, Corylus avellana
AFSWEVLEAALKVRR

SEQ ID NO: 1016 - protein, 15 aa, Corylus avellana
VEGEGFFEMACPHLS

SEQ ID NO: 1017 - protein, 15 aa, Corylus avellana
DPESFYRAFSWEVLE

SEQ ID NO: 1018 - protein, 15 aa, Corylus avellana
AGGEDPESFYRAFSW

SEQ ID NO: 1019 - protein, 15 aa, Corylus avellana
GEDPESFYRAFSWEV

SEQ ID NO: 1020 - protein, 15 aa, Corylus avellana
PESFYRAFSWEVLEA

SEQ ID NO: 1021 - protein, 15 aa, Corylus avellana
SFYRAFSWEVLEAAL

SEQ ID NO: 1022 - protein, 15 aa, Corylus avellana
NDQQFQCAGVAVIRR

SEQ ID NO: 1023 - protein, 15 aa, Corylus avellana
TSAIRALPDDVLANA

SEQ ID NO: 1024 - protein, 15 aa, Corylus avellana
YIERGRGITGVLFPG

SEQ ID NO: 1025 - protein, 15 aa, Corylus avellana
LILVSFSLCLLVLFN

SEQ ID NO: 1026 - protein, 15 aa, Corylus avellana
IYIERGRGITGVLFP

SEQ ID NO: 1027 - protein, 15 aa, Corylus avellana
NSNTLPVLRWLQLSA

SEQ ID NO: 1028 - protein, 15 aa, Fagopyrum esculentum
SAQHVVLYKNAILGP

SEQ ID NO: 1029 - protein, 15 aa, Fagopyrum esculentum
TKLILSFSLCLMVLS

SEQ ID NO: 1030 - protein, 15 aa, Fagopyrum esculentum
IQLSAQHVVLYKNAI

SEQ ID NO: 1031 - protein, 15 aa, Fagopyrum esculentum
QLSAQHVVLYKNAIL

SEQ ID NO: 1032 - protein, 15 aa, Fagopyrum esculentum
FIQLSAQHVVLYKNA

SEQ ID NO: 1033 - protein, 15 aa, Fagopyrum esculentum
LSAQHVVLYKNAILG

SEQ ID NO: 1034 - protein, 15 aa, Fagopyrum esculentum
RGQILVVPQGFAVVL

SEQ ID NO: 1035 - protein, 15 aa, Fagopyrum esculentum
TSVLRAIPVEVLANS

SEQ ID NO: 1036 - protein, 15 aa, Fagopyrum esculentum
VVGDEGRSVFDDNVQ

SEQ ID NO: 1037 - protein, 15 aa, Fagopyrum esculentum
PRAGRINTVNSNNLP

SEQ ID NO: 1038 - protein, 15 aa, Fagopyrum esculentum
KLILSFSLCLMVLSC

SEQ ID NO: 1039 - protein, 15 aa, Fagopyrum esculentum
AGRINTVNSNNLPIL

SEQ ID NO: 1040 - protein, 15 aa, Fagopyrum tataricum
SAQHVVLYKNAILGP

SEQ ID NO: 1041 - protein, 15 aa, Fagopyrum tataricum
TKLILSFSLCLMVLS

SEQ ID NO: 1042 - protein, 15 aa, Fagopyrum tataricum
IQLSAQHVVLYKNAI

SEQ ID NO: 1043 - protein, 15 aa, Fagopyrum tataricum
QLSAQHVVLYKNAIL

SEQ ID NO: 1044 - protein, 15 aa, Fagopyrum tataricum
FIQLSAQHVVLYKNA

SEQ ID NO: 1045 - protein, 15 aa, Fagopyrum tataricum
LSAQHVVLYKNAILG

SEQ ID NO: 1046 - protein, 15 aa, Fagopyrum tataricum
RGQILVVPQGFAVVL

SEQ ID NO: 1047 - protein, 15 aa, Fagopyrum tataricum
TSVLRAIPVEVLANS

SEQ ID NO: 1048 - protein, 15 aa, Fagopyrum tataricum
VVGDEGRSVFDDNVQ

SEQ ID NO: 1049 - protein, 15 aa, Fagopyrum tataricum
PRAGRINTVNSNNLP

SEQ ID NO: 1050 - protein, 15 aa, Fagopyrum tataricum
KLILSFSLCLMVLSC

SEQ ID NO: 1051 - protein, 15 aa, Fagopyrum tataricum
AGRINTVNSNNLPIL

SEQ ID NO: 1052 - protein, 15 aa, Glycine max
NTLLLPNHADADYLI

SEQ ID NO: 1053 - protein, 15 aa, Glycine max
IFVIPAGYPVVVNAT

SEQ ID NO: 1054 - protein, 15 aa, Glycine max
EQDIFVIPAGYPVVV

SEQ ID NO: 1055 - protein, 15 aa, Glycine max
QQSYLQGFSRNILEA

SEQ ID NO: 1056 - protein, 15 aa, Glycine max
RDPIYSNKLGKFFEI

SEQ ID NO: 1057 - protein, 15 aa, Glycine max
SEQDIFVIPAGYPVV

SEQ ID NO: 1058 - protein, 15 aa, Glycine max
TPEKNPQLRDLDIFL

SEQ ID NO: 1059 - protein, 15 aa, Glycine max
AQQSYLQGFSRNILE

SEQ ID NO: 1060 - protein, 15 aa, Glycine max
ELSEQDIFVIPAGYP

SEQ ID NO: 1061 - protein, 15 aa, Glycine max
DIFVIPAGYPVVVNA

SEQ ID NO: 1062 - protein, 15 aa, Glycine max
NLRSRDPIYSNKLGK

SEQ ID NO: 1063 - protein, 15 aa, Glycine max
AENNQRNFLAGSQDN

SEQ ID NO: 1064 - protein, 15 aa, Glycine max
LSAQYVVLYKNGIYS

SEQ ID NO: 1065 - protein, 15 aa, Glycine max
FQLSAQYVVLYKNGI

SEQ ID NO: 1066 - protein, 15 aa, Glycine max
SAQYVVLYKNGIYSP

SEQ ID NO: 1067 - protein, 15 aa, Glycine max
QLSAQYVVLYKNGIY

SEQ ID NO: 1068 - protein, 15 aa, Glycine max
GQLLVVPQNFVVAEQ

SEQ ID NO: 1069 - protein, 15 aa, Glycine max
QFQLSAQYVVLYKNG

SEQ ID NO: 1070 - protein, 15 aa, Juglans nigra
PEEVLANALQIPRED

SEQ ID NO: 1071 - protein, 15 aa, Juglans nigra
RGRAEVQVVDNFGQT

SEQ ID NO: 1072 - protein, 15 aa, Juglans nigra
DNGLEETICTLRLRE

SEQ ID NO: 1073 - protein, 15 aa, Juglans nigra
VEGRQLQVIRPRWSR

SEQ ID NO: 1074 - protein, 15 aa, Juglans nigra
GQQEYEQHRRQQQHQ

SEQ ID NO: 1075 - protein, 15 aa, Juglans nigra
QLSAERGALYSDALY

SEQ ID NO: 1076 - protein, 15 aa, Juglans nigra
LQLSAERGALYSDAL

SEQ ID NO: 1077 - protein, 15 aa, Juglans nigra
EAGVIESWDPNNQQF

SEQ ID NO: 1078 - protein, 15 aa, Juglans nigra
LYSDALYVPHWNLNA

SEQ ID NO: 1079 - protein, 15 aa, Juglans nigra
KRARNEGFEWVSFKT

SEQ ID NO: 1080 - protein, 15 aa, Juglans nigra
NNANQLDQNPRNFYL

SEQ ID NO: 1081 - protein, 15 aa, Juglans nigra
GQQQRGSGNNVFSGF

SEQ ID NO: 1082 - protein, 15 aa, Juglans nigra
LPEEVLANALQIPRE

SEQ ID NO: 1083 - protein, 15 aa, Juglans nigra
NENAMVSPLAGRTSA

SEQ ID NO: 1084 - protein, 15 aa, Juglans nigra
KFNRQESTLVRSRPS

SEQ ID NO: 1085 - protein, 15 aa, Juglans nigra
FRPQGQQEYEQHRRQ

SEQ ID NO: 1086 - protein, 15 aa, Juglans nigra
RGGRDDNGLEETICT

SEQ ID NO: 1087 - protein, 15 aa, Juglans nigra
AIRALPEEVLANALQ

SEQ ID NO: 1088 - protein, 15 aa, Juglans nigra
QLQVIRPRWSREEQE

SEQ ID NO: 1089 - protein, 15 aa, Juglans nigra
SIVRVEGRQLQVIRP

SEQ ID NO: 1090 - protein, 15 aa, Juglans nigra
EGRQLQVIRPRWSRE

SEQ ID NO: 1091 - protein, 15 aa, Juglans nigra
ARRLKFNRQESTLVR

SEQ ID NO: 1092 - protein, 15 aa, Juglans nigra
FYLAGNPDDEFRPQG

SEQ ID NO: 1093 - protein, 15 aa, Juglans nigra
ANALQIPREDARRLK

SEQ ID NO: 1094 - protein, 15 aa, Juglans nigra
DFLADAFNVDTETAR

SEQ ID NO: 1095 - protein, 15 aa, Juglans nigra
YLAGNPDDEFRPQGQ

SEQ ID NO: 1096 - protein, 15 aa, Juglans nigra
AVVKRARNEGFEWVS

SEQ ID NO: 1097 - protein, 15 aa, Juglans nigra
ALQIPREDARRLKFN

SEQ ID NO: 1098 - protein, 15 aa, Juglans nigra
RSIVRVEGRQLQVIR

SEQ ID NO: 1099 - protein, 15 aa, Juglans nigra
HRRSIVRVEGRQLQV

SEQ ID NO: 1100 - protein, 15 aa, Juglans nigra
RNEGFEWVSFKTNEN

SEQ ID NO: 1101 - protein, 15 aa, Juglans nigra
LAGNPDDEFRPQGQQ

SEQ ID NO: 1102 - protein, 15 aa, Juglans nigra
AGRISTANSHTLPVL

SEQ ID NO: 1103 - protein, 15 aa, Juglans nigra
AGNPDDEFRPQGQQE

SEQ ID NO: 1104 - protein, 15 aa, Juglans nigra
PQGQQEYEQHRRQQQ

SEQ ID NO: 1105 - protein, 15 aa, Juglans nigra
ALYSDALYVPHWNLN

SEQ ID NO: 1106 - protein, 15 aa, Juglans nigra
RRSIVRVEGRQLQVI

SEQ ID NO: 1107 - protein, 15 aa, Juglans nigra
NALQIPREDARRLKF

SEQ ID NO: 1108 - protein, 15 aa, Juglans nigra
NSHTLPVLRWLQLSA

SEQ ID NO: 1109 - protein, 15 aa, Juglans nigra
RPQGQQEYEQHRRQQ

SEQ ID NO: 1110 - protein, 15 aa, Juglans nigra
IEAEAGVIESWDPNN

SEQ ID NO: 1111 - protein, 15 aa, Juglans nigra
AEAGVIESWDPNNQQ

SEQ ID NO: 1112 - protein, 15 aa, Juglans nigra
LQIPREDARRLKFNR

SEQ ID NO: 1113 - protein, 15 aa, Juglans nigra
TSAIRALPEEVLANA

SEQ ID NO: 1114 - protein, 15 aa, Juglans nigra
IVRVEGRQLQVIRPR

SEQ ID NO: 1115 - protein, 15 aa, Juglans nigra
TTNNANQLDQNPRNF

SEQ ID NO: 1116 - protein, 15 aa, Juglans nigra
GRQLQVIRPRWSREE

SEQ ID NO: 1117 - protein, 15 aa, Juglans nigra
RVEGRQLQVIRPRWS

SEQ ID NO: 1118 - protein, 15 aa, Juglans nigra
VKRARNEGFEWVSFK

SEQ ID NO: 1119 - protein, 15 aa, Juglans nigra
DARRLKFNRQESTLV

SEQ ID NO: 1120 - protein, 15 aa, Juglans nigra
FEWVSFKTNENAMVS

SEQ ID NO: 1121 - protein, 15 aa, Juglans nigra
WVSFKTNENAMVSPL

SEQ ID NO: 1122 - protein, 15 aa, Juglans nigra
RRGGRDDNGLEETIC

SEQ ID NO: 1123 - protein, 15 aa, Juglans nigra
GQLLTIPQNFAVVKR

SEQ ID NO: 1124 - protein, 15 aa, Juglans nigra
EFRPQGQQEYEQHRR

SEQ ID NO: 1125 - protein, 15 aa, Juglans nigra
ICTLRLRENIGDPSR

SEQ ID NO: 1126 - protein, 15 aa, Juglans nigra
PILLSISLCLVALVN

SEQ ID NO: 1127 - protein, 15 aa, Juglans nigra
RQLQVIRPRWSREEQ

SEQ ID NO: 1128 - protein, 15 aa, Juglans nigra
RESESERRQSRRGGR

SEQ ID NO: 1129 - protein, 15 aa, Juglans nigra
RARNEGFEWVSFKTN

SEQ ID NO: 1130 - protein, 15 aa, Juglans nigra
IPREDARRLKFNRQE

SEQ ID NO: 1131 - protein, 15 aa, Juglans nigra
QRGSGNNVFSGFDAD

SEQ ID NO: 1132 - protein, 15 aa, Juglans nigra
QVIRPRWSREEQERE

SEQ ID NO: 1133 - protein, 15 aa, Juglans nigra
SERRQSRRGGRDDNG

SEQ ID NO: 1134 - protein, 15 aa, Juglans nigra
VSFKTNENAMVSPLA

SEQ ID NO: 1135 - protein, 15 aa, Juglans nigra
NDHRRSIVRVEGRQL

SEQ ID NO: 1136 - protein, 15 aa, Juglans regia
ELLRGIENYRVVILD

SEQ ID NO: 1137 - protein, 15 aa, Juglans regia
GENNQRDFLAGQNNI

SEQ ID NO: 1138 - protein, 15 aa, Juglans regia
LLRGIENYRVVILDA

SEQ ID NO: 1139 - protein, 15 aa, Juglans regia
LEREAKELSFNMPRE

SEQ ID NO: 1140 - protein, 15 aa, Juglans regia
RGIENYRVVILDANP

SEQ ID NO: 1141 - protein, 15 aa, Juglans regia
EREAKELSFNMPREE

SEQ ID NO: 1142 - protein, 15 aa, Juglans regia
GDIFVIPAGHPIAIT

SEQ ID NO: 1143 - protein, 15 aa, Juglans regia
LRGIENYRVVILDAN

SEQ ID NO: 1144 - protein, 15 aa, Juglans regia
IENYRVVILDANPNT

SEQ ID NO: 1145 - protein, 15 aa, Juglans regia
TERTELLRGIENYRV

SEQ ID NO: 1146 - protein, 15 aa, Juglans regia
VVEGTGRYEMACPHV

SEQ ID NO: 1147 - protein, 15 aa, Juglans regia
RGDIFVIPAGHPIAI

SEQ ID NO: 1148 - protein, 15 aa, Juglans regia
RTELLRGIENYRVVI

SEQ ID NO: 1149 - protein, 15 aa, Juglans regia
QLEREAKELSFNMPR

SEQ ID NO: 1150 - protein, 15 aa, Juglans regia
TELLRGIENYRVVIL

SEQ ID NO: 1151 - protein, 15 aa, Juglans regia
ERTELLRGIENYRVV

SEQ ID NO: 1152 - protein, 15 aa, Juglans regia
RGRAEVQVVDNFGQT

SEQ ID NO: 1153 - protein, 15 aa, Juglans regia
ATAFQIPREDARRLK

SEQ ID NO: 1154 - protein, 15 aa, Juglans regia
DNGLEETICTLRLRE

SEQ ID NO: 1155 - protein, 15 aa, Juglans regia
VEGRQLQVIRPRWSR

SEQ ID NO: 1156 - protein, 15 aa, Juglans regia
QLSAERGALYSDALY

SEQ ID NO: 1157 - protein, 15 aa, Juglans regia
LQLSAERGALYSDAL

SEQ ID NO: 1158 - protein, 15 aa, Juglans regia
EAGVIESWDPNNQQF

SEQ ID NO: 1159 - protein, 15 aa, Juglans regia
LYSDALYVPHWNLNA

SEQ ID NO: 1160 - protein, 15 aa, Juglans regia
KRARNEGFEWVSFKT

SEQ ID NO: 1161 - protein, 15 aa, Juglans regia
NNANQLDQNPRNFYL

SEQ ID NO: 1162 - protein, 15 aa, Juglans regia
GQQEYEQHRRQQQRQ

SEQ ID NO: 1163 - protein, 15 aa, Juglans regia
NENAMVSPLAGRTSA

SEQ ID NO: 1164 - protein, 15 aa, Juglans regia
KFNRQESTLVRSRPS

SEQ ID NO: 1165 - protein, 15 aa, Juglans regia
FRPQGQQEYEQHRRQ

SEQ ID NO: 1166 - protein, 15 aa, Juglans regia
FQIPREDARRLKFNR

SEQ ID NO: 1167 - protein, 15 aa, Juglans regia
RGGRDDNGLEETICT

SEQ ID NO: 1168 - protein, 15 aa, Juglans regia
TNNNANQLDQNPRNF

SEQ ID NO: 1169 - protein, 15 aa, Juglans regia
QLQVIRPRWSREEQE

SEQ ID NO: 1170 - protein, 15 aa, Juglans regia
SIVRVEGRQLQVIRP

SEQ ID NO: 1171 - protein, 15 aa, Juglans regia
EGRQLQVIRPRWSRE

SEQ ID NO: 1172 - protein, 15 aa, Juglans regia
ARRLKFNRQESTLVR

SEQ ID NO: 1173 - protein, 15 aa, Juglans regia
FYLAGNPDDEFRPQG

SEQ ID NO: 1174 - protein, 15 aa, Juglans regia
AIRALPEEVLATAFQ

SEQ ID NO: 1175 - protein, 15 aa, Juglans regia
DFLADAFNVDTETAR

SEQ ID NO: 1176 - protein, 15 aa, Juglans regia
QQQRGLGNNVFSGFD

SEQ ID NO: 1177 - protein, 15 aa, Juglans regia
YLAGNPDDEFRPQGQ

SEQ ID NO: 1178 - protein, 15 aa, Juglans regia
PILLSIYLFLIVALF

SEQ ID NO: 1179 - protein, 15 aa, Juglans regia
AVVKRARNEGFEWVS

SEQ ID NO: 1180 - protein, 15 aa, Juglans regia
TAFQIPREDARRLKF

SEQ ID NO: 1181 - protein, 15 aa, Juglans regia
LPEEVLATAFQIPRE

SEQ ID NO: 1182 - protein, 15 aa, Juglans regia
RSIVRVEGRQLQVIR

SEQ ID NO: 1183 - protein, 15 aa, Juglans regia
VYIARGRGITGVLFP

SEQ ID NO: 1184 - protein, 15 aa, Juglans regia
HRRSIVRVEGRQLQV

SEQ ID NO: 1185 - protein, 15 aa, Juglans regia
RNEGFEWVSFKTNEN

SEQ ID NO: 1186 - protein, 15 aa, Juglans regia
LAGNPDDEFRPQGQQ

SEQ ID NO: 1187 - protein, 15 aa, Juglans regia
AGNPDDEFRPQGQQE

SEQ ID NO: 1188 - protein, 15 aa, Juglans regia
PQGQQEYEQHRRQQQ

SEQ ID NO: 1189 - protein, 15 aa, Juglans regia
ALYSDALYVPHWNLN

SEQ ID NO: 1190 - protein, 15 aa, Juglans regia
RRSIVRVEGRQLQVI

SEQ ID NO: 1191 - protein, 15 aa, Juglans regia
NSHTLPVLRWLQLSA

SEQ ID NO: 1192 - protein, 15 aa, Juglans regia
RPQGQQEYEQHRRQQ

SEQ ID NO: 1193 - protein, 15 aa, Juglans regia
TSAIRALPEEVLATA

SEQ ID NO: 1194 - protein, 15 aa, Juglans regia
QRGLGNNVFSGFDAD

SEQ ID NO: 1195 - protein, 15 aa, Juglans regia
IEAEAGVIESWDPNN

SEQ ID NO: 1196 - protein, 15 aa, Juglans regia
QKIRHFREGDIIAFP

SEQ ID NO: 1197 - protein, 15 aa, Juglans regia
AEAGVIESWDPNNQQ

SEQ ID NO: 1198 - protein, 15 aa, Juglans regia
YIARGRGITGVLFPG

SEQ ID NO: 1199 - protein, 15 aa, Juglans regia
IVRVEGRQLQVIRPR

SEQ ID NO: 1200 - protein, 15 aa, Juglans regia
GRQLQVIRPRWSREE

SEQ ID NO: 1201 - protein, 15 aa, Juglans regia
RVEGRQLQVIRPRWS

SEQ ID NO: 1202 - protein, 15 aa, Juglans regia
VKRARNEGFEWVSFK

SEQ ID NO: 1203 - protein, 15 aa, Juglans regia
DARRLKFNRQESTLV

SEQ ID NO: 1204 - protein, 15 aa, Juglans regia
FEWVSFKTNENAMVS

SEQ ID NO: 1205 - protein, 15 aa, Juglans regia
WVSFKTNENAMVSPL

SEQ ID NO: 1206 - protein, 15 aa, Juglans regia
RRGGRDDNGLEETIC

SEQ ID NO: 1207 - protein, 15 aa, Juglans regia
GQLLTIPQNFAVVKR

SEQ ID NO: 1208 - protein, 15 aa, Juglans regia
EFRPQGQQEYEQHRR

SEQ ID NO: 1209 - protein, 15 aa, Juglans regia
ICTLRLRENIGDPSR

SEQ ID NO: 1210 - protein, 15 aa, Juglans regia
RQLQVIRPRWSREEQ

SEQ ID NO: 1211 - protein, 15 aa, Juglans regia
RESESERRQSRRGGR

SEQ ID NO: 1212 - protein, 15 aa, Juglans regia
RARNEGFEWVSFKTN

SEQ ID NO: 1213 - protein, 15 aa, Juglans regia
IPREDARRLKFNRQE

SEQ ID NO: 1214 - protein, 15 aa, Juglans regia
PEEVLATAFQIPRED

SEQ ID NO: 1215 - protein, 15 aa, Juglans regia
QVIRPRWSREEQERE

SEQ ID NO: 1216 - protein, 15 aa, Juglans regia
SERRQSRRGGRDDNG

SEQ ID NO: 1217 - protein, 15 aa, Juglans regia
VSFKTNENAMVSPLA

SEQ ID NO: 1218 - protein, 15 aa, Juglans regia
NDHRRSIVRVEGRQL

SEQ ID NO: 1219 - protein, 15 aa, Lens culinaris
SFLSGFSKNILEAAF

SEQ ID NO: 1220 - protein, 15 aa, Lens culinaris
VIVKVSREQIEELSK

SEQ ID NO: 1221 - protein, 15 aa, Lens culinaris
RNPIYSNKFGKFFEI

SEQ ID NO: 1222 - protein, 15 aa, Lens culinaris
FNLERGDTIKLPAGT

SEQ ID NO: 1223 - protein, 15 aa, Lens culinaris
RLLQRFDKRSKIFEN

SEQ ID NO: 1224 - protein, 15 aa, Lens culinaris
RFDKRSKIFENLQNY

SEQ ID NO: 1225 - protein, 15 aa, Lens culinaris
LNLIGFGINAKNNQR

SEQ ID NO: 1226 - protein, 15 aa, Lens culinaris
EKNPQLQDLDIFVNS

SEQ ID NO: 1227 - protein, 15 aa, Lens culinaris
NLRSRNPIYSNKFGK

SEQ ID NO: 1228 - protein, 15 aa, Lens culinaris
IRLLQRFDKRSKIFE

SEQ ID NO: 1229 - protein, 15 aa, Lens culinaris
NENGHIRLLQRFDKR

SEQ ID NO: 1230 - protein, 15 aa, Lens culinaris
SPGDVLVIPAGHPVA

SEQ ID NO: 1231 - protein, 15 aa, Lens culinaris
IYENENGHIRLLQRF

SEQ ID NO: 1232 - protein, 15 aa, Lens culinaris
LLQRFDKRSKIFENL

SEQ ID NO: 1233 - protein, 15 aa, Lens culinaris
DLNLIGFGINAKNNQ

SEQ ID NO: 1234 - protein, 15 aa, Lens culinaris
SDLNLIGFGINAKNN

SEQ ID NO: 1235 - protein, 15 aa, Lens culinaris
KRSKIFENLQNYRLL

SEQ ID NO: 1236 - protein, 15 aa, Lens culinaris
LQRFDKRSKIFENLQ

SEQ ID NO: 1237 - protein, 15 aa, Lens culinaris
EDVIVKVSREQIEEL

SEQ ID NO: 1238 - protein, 15 aa, Lens culinaris
GHPVAINASSDLNLI

SEQ ID NO: 1239 - protein, 15 aa, Lens culinaris
PSFLSGFSKNILEAA

SEQ ID NO: 1240 - protein, 15 aa, Lens culinaris
AGHPVAINASSDLNL

SEQ ID NO: 1241 - protein, 15 aa, Lens culinaris
TPEKNPQLQDLDIFV

SEQ ID NO: 1242 - protein, 15 aa, Lens culinaris
ENGHIRLLQRFDKRS

SEQ ID NO: 1243 - protein, 15 aa, Lens culinaris
KNNQRNFLAGEEDNV

SEQ ID NO: 1244 - protein, 15 aa, Lens culinaris
NGHIRLLQRFDKRSK

SEQ ID NO: 1245 - protein, 15 aa, Lens culinaris
VKVSREQIEELSKNA

SEQ ID NO: 1246 - protein, 15 aa, Lens culinaris
SKNILEAAFNTEYEE

SEQ ID NO: 1247 - protein, 15 aa, Lens culinaris
HIRLLQRFDKRSKIF

SEQ ID NO: 1248 - protein, 15 aa, Lens culinaris
GHIRLLQRFDKRSKI

SEQ ID NO: 1249 - protein, 15 aa, Lupinus albus
DIFVIPAGYPISVNA

SEQ ID NO: 1250 - protein, 15 aa, Lupinus albus
FTEINEGALLLPHYN

SEQ ID NO: 1251 - protein, 15 aa, Lupinus albus
SEGDIFVIPAGYPIS

SEQ ID NO: 1252 - protein, 15 aa, Lupinus albus
DRNPQVQDLDISLTF

SEQ ID NO: 1253 - protein, 15 aa, Lupinus albus
QSGPFNLRSNEPIYS

SEQ ID NO: 1254 - protein, 15 aa, Lupinus albus
RLSEGDIFVIPAGYP

SEQ ID NO: 1255 - protein, 15 aa, Lupinus albus
TEINEGALLLPHYNS

SEQ ID NO: 1256 - protein, 15 aa, Lupinus albus
EGDIFVIPAGYPISV

SEQ ID NO: 1257 - protein, 15 aa, Lupinus albus
REVKELTFPGSAEDI

SEQ ID NO: 1258 - protein, 15 aa, Lupinus albus
IFVIPAGYPISVNAS

SEQ ID NO: 1259 - protein, 15 aa, Lupinus albus
EINEGALLLPHYNSK

SEQ ID NO: 1260 - protein, 15 aa, Lupinus angustifolius
DIFVIPAGYPISVNA

SEQ ID NO: 1261 - protein, 15 aa, Lupinus angustifolius
FTEINEGALLLPHYN

SEQ ID NO: 1262 - protein, 15 aa, Lupinus angustifolius
ESGPFNLRSNESIYS

SEQ ID NO: 1263 - protein, 15 aa, Lupinus angustifolius
SEGDIFVIPAGYPIS

SEQ ID NO: 1264 - protein, 15 aa, Lupinus angustifolius
ERNPQVQDLDISLTF

SEQ ID NO: 1265 - protein, 15 aa, Lupinus angustifolius
RRYSARLSEGDIFVI

SEQ ID NO: 1266 - protein, 15 aa, Lupinus angustifolius
REVKELTFPGSAQDV

SEQ ID NO: 1267 - protein, 15 aa, Lupinus angustifolius
RLSEGDIFVIPAGYP

SEQ ID NO: 1268 - protein, 15 aa, Lupinus angustifolius
TEINEGALLLPHYNS

SEQ ID NO: 1269 - protein, 15 aa, Lupinus angustifolius
FNLRSNESIYSNKFG

SEQ ID NO: 1270 - protein, 15 aa, Lupinus angustifolius
EGDIFVIPAGYPISV

SEQ ID NO: 1271 - protein, 15 aa, Lupinus angustifolius
IFVIPAGYPISVNAS

SEQ ID NO: 1272 - protein, 15 aa, Lupinus angustifolius
EINEGALLLPHYNSK

SEQ ID NO: 1273 - protein, 15 aa, Pisum sativum
ENGHIRLLQKFDKRS

SEQ ID NO: 1274 - protein, 15 aa, Pisum sativum
SKNILEAAFNTNYEE

SEQ ID NO: 1275 - protein, 15 aa, Pisum sativum
VIVKVSREQIEELSK

SEQ ID NO: 1276 - protein, 15 aa, Pisum sativum
RLLQKFDKRSKIFEN

SEQ ID NO: 1277 - protein, 15 aa, Pisum sativum
SLLSGFSKNILEAAF

SEQ ID NO: 1278 - protein, 15 aa, Pisum sativum
RNPIYSNKFGKFFEI

SEQ ID NO: 1279 - protein, 15 aa, Pisum sativum
NENGHIRLLQKFDKR

SEQ ID NO: 1280 - protein, 15 aa, Pisum sativum
FNLERGDTIKLPAGT

SEQ ID NO: 1281 - protein, 15 aa, Pisum sativum
LLQKFDKRSKIFENL

SEQ ID NO: 1282 - protein, 15 aa, Pisum sativum
NLRSRNPIYSNKFGK

SEQ ID NO: 1283 - protein, 15 aa, Pisum sativum
LNLIGFGINAENNER

SEQ ID NO: 1284 - protein, 15 aa, Pisum sativum
HIRLLQKFDKRSKIF

SEQ ID NO: 1285 - protein, 15 aa, Pisum sativum
SPGDVFVIPAGHPVA

SEQ ID NO: 1286 - protein, 15 aa, Pisum sativum
NVIVKVSREQIEELS

SEQ ID NO: 1287 - protein, 15 aa, Pisum sativum
KRSKIFENLQNYRLL

SEQ ID NO: 1288 - protein, 15 aa, Pisum sativum
KFDKRSKIFENLQNY

SEQ ID NO: 1289 - protein, 15 aa, Pisum sativum
NGHIRLLQKFDKRSK

SEQ ID NO: 1290 - protein, 15 aa, Pisum sativum
DLNLIGFGINAENNE

SEQ ID NO: 1291 - protein, 15 aa, Pisum sativum
IRLLQKFDKRSKIFE

SEQ ID NO: 1292 - protein, 15 aa, Pisum sativum
LYENENGHIRLLQKF

SEQ ID NO: 1293 - protein, 15 aa, Pisum sativum
GHPVAINASSDLNLI

SEQ ID NO: 1294 - protein, 15 aa, Pisum sativum
LQKFDKRSKIFENLQ

SEQ ID NO: 1295 - protein, 15 aa, Pisum sativum
AGHPVAINASSDLNL

SEQ ID NO: 1296 - protein, 15 aa, Pisum sativum
SDLNLIGFGINAENN

SEQ ID NO: 1297 - protein, 15 aa, Pisum sativum
ENNERNFLAGEEDNV

SEQ ID NO: 1298 - protein, 15 aa, Pisum sativum
VKVSREQIEELSKNA

SEQ ID NO: 1299 - protein, 15 aa, Pisum sativum
GHIRLLQKFDKRSKI

SEQ ID NO: 1300 - protein, 15 aa, Pisum sativum
PSLLSGFSKNILEAA

SEQ ID NO: 1301 - protein, 15 aa, Pisum sativum
RFDKRSDLFENLQNY

SEQ ID NO: 1302 - protein, 15 aa, Pisum sativum
SPGDVVIIPAGHPVA

SEQ ID NO: 1303 - protein, 15 aa, Pisum sativum
KRSDLFENLQNYRLV

SEQ ID NO: 1304 - protein, 15 aa, Pisum sativum
CVEINEGALMLPHYN

SEQ ID NO: 1305 - protein, 15 aa, Pisum sativum
VKVSREQIEELKKLA

SEQ ID NO: 1306 - protein, 15 aa, Pisum sativum
NENGHIRLLQRFDKR

SEQ ID NO: 1307 - protein, 15 aa, Pisum sativum
AIVKVSREQIEELKK

SEQ ID NO: 1308 - protein, 15 aa, Pisum sativum
LNLLGFGINAENNER

SEQ ID NO: 1309 - protein, 15 aa, Pisum sativum
AGHPVAITASSNLNL

SEQ ID NO: 1310 - protein, 15 aa, Pisum sativum
INEGALMLPHYNSRA

SEQ ID NO: 1311 - protein, 15 aa, Pisum sativum
LFENENGHIRLLQRF

SEQ ID NO: 1312 - protein, 15 aa, Pisum sativum
HIRLLQRFDKRSDLF

SEQ ID NO: 1313 - protein, 15 aa, Pisum sativum
YLRGFSKNILEASYN

SEQ ID NO: 1314 - protein, 15 aa, Pisum sativum
GHPVAITASSNLNLL

SEQ ID NO: 1315 - protein, 15 aa, Pisum sativum
RLLQRFDKRSDLFEN

SEQ ID NO: 1316 - protein, 15 aa, Pisum sativum
KELTFPGSVQEINRL

SEQ ID NO: 1317 - protein, 15 aa, Pisum sativum
LQRFDKRSDLFENLQ

SEQ ID NO: 1318 - protein, 15 aa, Pisum sativum
YNLERGDTIKLPAGT

SEQ ID NO: 1319 - protein, 15 aa, Pisum sativum
LLQRFDKRSDLFENL

SEQ ID NO: 1320 - protein, 15 aa, Pisum sativum
RGFSKNILEASYNTR

SEQ ID NO: 1321 - protein, 15 aa, Pisum sativum
NGHIRLLQRFDKRSD

SEQ ID NO: 1322 - protein, 15 aa, Pisum sativum
ENGHIRLLQRFDKRS

SEQ ID NO: 1323 - protein, 15 aa, Pisum sativum
GHIRLLQRFDKRSDL

SEQ ID NO: 1324 - protein, 15 aa, Pisum sativum
IRLLQRFDKRSDLFE

SEQ ID NO: 1325 - protein, 15 aa, Pistacia vera
QRNGLEETFCTMTLK

SEQ ID NO: 1326 - protein, 15 aa, Pistacia vera
EGQLVVVPQNFAVVK

SEQ ID NO: 1327 - protein, 15 aa, Pistacia vera
VVVPQNFAVVKRASS

SEQ ID NO: 1328 - protein, 15 aa, Pistacia vera
QEGDVIALPAGVAHW

SEQ ID NO: 1329 - protein, 15 aa, Pistacia vera
LNLPILRFLQLSAKK

SEQ ID NO: 1330 - protein, 15 aa, Pistacia vera
VPQNFAVVKRASSDK

SEQ ID NO: 1331 - protein, 15 aa, Pistacia vera
LVVVPQNFAVVKRAS

SEQ ID NO: 1332 - protein, 15 aa, Pistacia vera
KQCKHQCKVQRQYDE

SEQ ID NO: 1333 - protein, 15 aa, Pistacia vera
FYRAFSREVLEAALK

SEQ ID NO: 1334 - protein, 15 aa, Pistacia vera
PESFYRAFSREVLEA

SEQ ID NO: 1335 - protein, 15 aa, Pistacia vera
ENPESFYRAFSREVL

SEQ ID NO: 1336 - protein, 15 aa, Pistacia vera
PGGENPESFYRAFSR

SEQ ID NO: 1337 - protein, 15 aa, Pistacia vera
RAFSREVLEAALKTP

SEQ ID NO: 1338 - protein, 15 aa, Pistacia vera
YRAFSREVLEAALKT

SEQ ID NO: 1339 - protein, 15 aa, Pistacia vera
NPESFYRAFSREVLE

SEQ ID NO: 1340 - protein, 15 aa, Pistacia vera
SFYRAFSREVLEAAL

SEQ ID NO: 1341 - protein, 15 aa, Pistacia vera
ESFYRAFSREVLEAA

SEQ ID NO: 1342 - protein, 15 aa, Pistacia vera
GENPESFYRAFSREV

SEQ ID NO: 1343 - protein, 15 aa, Pistacia vera
EGRLEIACPHLSSSK

SEQ ID NO: 1344 - protein, 15 aa, Pistacia vera
AFSREVLEAALKTPR

SEQ ID NO: 1345 - protein, 15 aa, Pistacia vera
QCKHQCKVQRQYDEE

SEQ ID NO: 1346 - protein, 15 aa, Pistacia vera
IFVVPQNFAVVKRAR

SEQ ID NO: 1347 - protein, 15 aa, Pistacia vera
FVVPQNFAVVKRARG

SEQ ID NO: 1348 - protein, 15 aa, Pistacia vera
RKFNLAGNPEDEFQQ

SEQ ID NO: 1349 - protein, 15 aa, Pistacia vera
ISREDARKIKFNNEQ

SEQ ID NO: 1350 - protein, 15 aa, Pistacia vera
NWCYNEGNSPVVTVT

SEQ ID NO: 1351 - protein, 15 aa, Pistacia vera
PAGVANWCYNEGNSP

SEQ ID NO: 1352 - protein, 15 aa, Pistacia vera
SLNLPILKWLQLSAE

SEQ ID NO: 1353 - protein, 15 aa, Prunus Dulcis
VLANAYQISREQARQ

SEQ ID NO: 1354 - protein, 15 aa, Prunus Dulcis
NTLAGRTSFLRALPD

SEQ ID NO: 1355 - protein, 15 aa, Prunus Dulcis
STLNSHNLPILRFLR

SEQ ID NO: 1356 - protein, 15 aa, Prunus Dulcis
ISTLNSHNLPILRFL

SEQ ID NO: 1357 - protein, 15 aa, Prunus Dulcis
PHWNVNAHSVVYVIR

SEQ ID NO: 1358 - protein, 15 aa, Prunus Dulcis
RAGRISTLNSHNLPI

SEQ ID NO: 1359 - protein, 15 aa, Sesamum indicum
RGIENYRVAILEAEP

SEQ ID NO: 1360 - protein, 15 aa, Sesamum indicum
LRGIENYRVAILEAE

SEQ ID NO: 1361 - protein, 15 aa, Sesamum indicum
EREAKELAFGMPARE

SEQ ID NO: 1362 - protein, 15 aa, Sesamum indicum
QLEREAKELAFGMPA

SEQ ID NO: 1363 - protein, 15 aa, Sesamum indicum
IENYRVAILEAEPQT

SEQ ID NO: 1364 - protein, 15 aa, Sesamum indicum
QCKHQCKAQQQISKE

SEQ ID NO: 1365 - protein, 15 aa, Sesamum indicum
SELLRGIENYRVAIL

SEQ ID NO: 1366 - protein, 15 aa, Sesamum indicum
DRSELLRGIENYRVA

SEQ ID NO: 1367 - protein, 15 aa, Sesamum indicum
LLRGIENYRVAILEA

SEQ ID NO: 1368 - protein, 15 aa, Sesamum indicum
LEREAKELAFGMPAR

SEQ ID NO: 1369 - protein, 15 aa, Sesamum indicum
RSELLRGIENYRVAI

SEQ ID NO: 1370 - protein, 15 aa, Sesamum indicum
TDRSELLRGIENYRV

SEQ ID NO: 1371 - protein, 15 aa, Sesamum indicum
KQCKHQCKAQQQISK

SEQ ID NO: 1372 - protein, 15 aa, Sesamum indicum
ELLRGIENYRVAILE

SEQ ID NO: 1373 - protein, 15 aa, Sesamum indicum
GLEETFCTMKFRTNV

SEQ ID NO: 1374 - protein, 15 aa, Sesamum indicum
QLDQTFRHFFLAGNP

SEQ ID NO: 1375 - protein, 15 aa, Sesamum indicum
GLEWISFKTNDNAMT

SEQ ID NO: 1376 - protein, 15 aa, Sesamum indicum
QVVGHTGRSVFDGVV

SEQ ID NO: 1377 - protein, 15 aa, Sinapis alba
ISLEEARKIKFNTLE

SEQ ID NO: 1378 - protein, 15 aa, Vigna radiata
NTLLLPHHADADFLL

SEQ ID NO: 1379 - protein, 15 aa, Vigna radiata
TPEKNPQLRDLDMFI

SEQ ID NO: 1380 - protein, 15 aa, Vigna radiata
YLQGFSKNILEASFD

SEQ ID NO: 1381 - protein, 15 aa, Vigna radiata
ENNQRNFLAGEKDNV

SEQ ID NO: 1382 - protein, 15 aa, Vigna radiata
QQSYLQGFSKNILEA

SEQ ID NO: 1383 - protein, 15 aa, Vigna radiata
AQQSYLQGFSKNILE

SEQ ID NO: 1384 - protein, 15 aa, Anacardium occidentale
VFHGPGGENPESFYR

SEQ ID NO: 1385 - protein, 15 aa, Anacardium occidentale
ANITKGGMSVPFYNS

SEQ ID NO: 1386 - protein, 15 aa, Anacardium occidentale
RATKIAIVVSGEGCV

SEQ ID NO: 1387 - protein, 15 aa, Anacardium occidentale
QDEEFFFQGPEWRKE

SEQ ID NO: 1388 - protein, 15 aa, Anacardium occidentale
VFGKQDEEFFFQGPE

SEQ ID NO: 1389 - protein, 15 aa, Anacardium occidentale
EVDKVFGKQDEEFFF

SEQ ID NO: 1390 - protein, 15 aa, Anacardium occidentale
AIVVSGEGCVEIACP

SEQ ID NO: 1391 - protein, 15 aa, Anacardium occidentale
VDKVFGKQDEEFFFQ

SEQ ID NO: 1392 - protein, 15 aa, Anacardium occidentale
QCVKECEKYYKEKKG

SEQ ID NO: 1393 - protein, 15 aa, Anacardium occidentale
CKHQCKVQRQYDEQQ

SEQ ID NO: 1394 - protein, 15 aa, Anacardium occidentale
IRAMSRRGEGPKIWP

SEQ ID NO: 1395 - protein, 15 aa, Anacardium occidentale
HFEVFHGPGGENPES

SEQ ID NO: 1396 - protein, 15 aa, Anacardium occidentale
VNLPGHFEVFHGPGG

SEQ ID NO: 1397 - protein, 15 aa, Anacardium occidentale
VQRQYDEQQKEQCVK

SEQ ID NO: 1398 - protein, 15 aa, Anacardium occidentale
VVSGEGCVEIACPHL

SEQ ID NO: 1399 - protein, 15 aa, Anacardium occidentale
AMSRRGEGPKIWPFT

SEQ ID NO: 1400 - protein, 15 aa, Anacardium occidentale
IVVSGEGCVEIACPH

SEQ ID NO: 1401 - protein, 15 aa, Anacardium occidentale
YNSRATKIAIVVSGE

SEQ ID NO: 1402 - protein, 15 aa, Anacardium occidentale
QIRAMSRRGEGPKIW

SEQ ID NO: 1403 - protein, 15 aa, Anacardium occidentale
EQCVKECEKYYKEKK

SEQ ID NO: 1404 - protein, 15 aa, Anacardium occidentale
MSVPFYNSRATKIAI

SEQ ID NO: 1405 - protein, 15 aa, Anacardium occidentale
VPFYNSRATKIAIVV

SEQ ID NO: 1406 - protein, 15 aa, Anacardium occidentale
NITKGGMSVPFYNSR

SEQ ID NO: 1407 - protein, 15 aa, Anacardium occidentale
KEQCVKECEKYYKEK

SEQ ID NO: 1408 - protein, 15 aa, Anacardium occidentale
GEGCVEIACPHLSSS

SEQ ID NO: 1409 - protein, 15 aa, Anacardium occidentale
SVPFYNSRATKIAIV

SEQ ID NO: 1410 - protein, 15 aa, Anacardium occidentale
PFYNSRATKIAIVVS

SEQ ID NO: 1411 - protein, 15 aa, Anacardium occidentale
NPYVFEDEDFTTKVK

SEQ ID NO: 1412 - protein, 15 aa, Anacardium occidentale
DEEFFFQGPEWRKEK

SEQ ID NO: 1413 - protein, 15 aa, Anacardium occidentale
KVFGKQDEEFFFQGP

SEQ ID NO: 1414 - protein, 15 aa, Anacardium occidentale
YANITKGGMSVPFYN

SEQ ID NO: 1415 - protein, 15 aa, Anacardium occidentale
ITKGGMSVPFYNSRA

SEQ ID NO: 1416 - protein, 15 aa, Anacardium occidentale
GMSVPFYNSRATKIA

SEQ ID NO: 1417 - protein, 15 aa, Anacardium occidentale
FIVPAGHPFATVASG

SEQ ID NO: 1418 - protein, 15 aa, Anacardium occidentale
IEETICTMRLKENIN

SEQ ID NO: 1419 - protein, 15 aa, Anacardium occidentale
MTSPLAGRTSVLGGM

SEQ ID NO: 1420 - protein, 15 aa, Anacardium occidentale
ILFHGCLASRQEWQQ

SEQ ID NO: 1421 - protein, 15 aa, Anacardium occidentale
ANAFQISREDARKIK

SEQ ID NO: 1422 - protein, 15 aa, Anacardium occidentale
QDECQIDRLDALEPD

SEQ ID NO: 1423 - protein, 15 aa, Anacardium occidentale
VVDNFGNRVFDGEVR

SEQ ID NO: 1424 - protein, 15 aa, Anacardium occidentale
GMPEEVLANAFQISR

SEQ ID NO: 1425 - protein, 15 aa, Anacardium occidentale
MPEEVLANAFQISRE

SEQ ID NO: 1426 - protein, 15 aa, Anacardium occidentale
NHEQFRCAGVALVRH

SEQ ID NO: 1427 - protein, 15 aa, Anacardium occidentale
PEVGRLTTLNSLNLP

SEQ ID NO: 1428 - protein, 15 aa, Anacardium occidentale
RCAGVALVRHTIQPN

SEQ ID NO: 1429 - protein, 15 aa, Anacardium occidentale
VLGGMPEEVLANAFQ

SEQ ID NO: 1430 - protein, 15 aa, Anacardium occidentale
CQIDRLDALEPDNRV

SEQ ID NO: 1431 - protein, 15 aa, Anacardium occidentale
YTPEVGRLTTLNSLN

SEQ ID NO: 1432 - protein, 15 aa, Anacardium occidentale
EERFEWISFKTNDRA

SEQ ID NO: 1433 - protein, 15 aa, Anacardium occidentale
LTTLNSLNLPILKWL

SEQ ID NO: 1434 - protein, 15 aa, Anacardium occidentale
VLPHWNLNSHSIIYG

SEQ ID NO: 1435 - protein, 15 aa, Anacardium occidentale
GGMPEEVLANAFQIS

SEQ ID NO: 1436 - protein, 15 aa, Anacardium occidentale
HEQFRCAGVALVRHT

SEQ ID NO: 1437 - protein, 15 aa, Anacardium occidentale
ERFEWISFKTNDRAM

SEQ ID NO: 1438 - protein, 15 aa, Anacardium occidentale
TSVLGGMPEEVLANA

SEQ ID NO: 1439 - protein, 15 aa, Anacardium occidentale
WCYNEGNSPVVTVTL

SEQ ID NO: 1440 - protein, 15 aa, Anacardium occidentale
AMTSPLAGRTSVLGG

SEQ ID NO: 1441 - protein, 15 aa, Anacardium occidentale
CFLILFHGCLASRQE

SEQ ID NO: 1442 - protein, 15 aa, Anacardium occidentale
CYNEGNSPVVTVTLL

SEQ ID NO: 1443 - protein, 15 aa, Anacardium occidentale
LILFHGCLASRQEWQ

SEQ ID NO: 1444 - protein, 15 aa, Anacardium occidentale
FRCAGVALVRHTIQP

SEQ ID NO: 1445 - protein, 15 aa, Anacardium occidentale
GIEETICTMRLKENI

SEQ ID NO: 1446 - protein, 15 aa, Anacardium occidentale
VEYEAGTVEAWDPNH

SEQ ID NO: 1447 - protein, 15 aa, Anacardium occidentale
KRAREERFEWISFKT

SEQ ID NO: 1448 - protein, 15 aa, Anacardium occidentale
PHWNLNSHSIIYGCK

SEQ ID NO: 1449 - protein, 15 aa, Anacardium occidentale
ETICTMRLKENINDP

SEQ ID NO: 1450 - protein, 15 aa, Anacardium occidentale
EQFRCAGVALVRHTI

SEQ ID NO: 1451 - protein, 15 aa, Anacardium occidentale
VGRLTTLNSLNLPIL

SEQ ID NO: 1452 - protein, 15 aa, Anacardium occidentale
AREERFEWISFKTND

SEQ ID NO: 1453 - protein, 15 aa, Anacardium occidentale
QVQVVDNFGNRVFDG

SEQ ID NO: 1454 - protein, 15 aa, Anacardium occidentale
QVVDNFGNRVFDGEV

SEQ ID NO: 1455 - protein, 15 aa, Anacardium occidentale
VKRAREERFEWISFK

SEQ ID NO: 1456 - protein, 15 aa, Anacardium occidentale
QQDECQIDRLDALEP

SEQ ID NO: 1457 - protein, 15 aa, Anacardium occidentale
VQVVDNFGNRVFDGE

SEQ ID NO: 1458 - protein, 15 aa, Anacardium occidentale
TTLNSLNLPILKWLQ

SEQ ID NO: 1459 - protein, 15 aa, Anacardium occidentale
REDARKIKFNNQQTT

SEQ ID NO: 1460 - protein, 15 aa, Anacardium occidentale
AVVKRAREERFEWIS

SEQ ID NO: 1461 - protein, 15 aa, Anacardium occidentale
RLTTLNSLNLPILKW

SEQ ID NO: 1462 - protein, 15 aa, Anacardium occidentale
IYTPEVGRLTTLNSL

SEQ ID NO: 1463 - protein, 15 aa, Anacardium occidentale
TPRKFHLAGNPKDVF

SEQ ID NO: 1464 - protein, 15 aa, Anacardium occidentale
TLNSLNLPILKWLQL

SEQ ID NO: 1465 - protein, 15 aa, Anacardium occidentale
PNHEQFRCAGVALVR

SEQ ID NO: 1466 - protein, 15 aa, Anacardium occidentale
RAMTSPLAGRTSVLG

SEQ ID NO: 1467 - protein, 15 aa, Anacardium occidentale
FLILFHGCLASRQEW

SEQ ID NO: 1468 - protein, 15 aa, Anacardium occidentale
REERFEWISFKTNDR

SEQ ID NO: 1469 - protein, 15 aa, Anacardium occidentale
EVGRLTTLNSLNLPI

SEQ ID NO: 1470 - protein, 15 aa, Anacardium occidentale
GRLTTLNSLNLPILK

SEQ ID NO: 1471 - protein, 15 aa, Anacardium occidentale
FQISREDARKIKFNN

SEQ ID NO: 1472 - protein, 15 aa, Arachis hypogaea
EGALMLPHFNSKAMV

SEQ ID NO: 1473 - protein, 15 aa, Arachis hypogaea
RVLQRFDQRSRQFQN

SEQ ID NO: 1474 - protein, 15 aa, Arachis hypogaea
QNGRIRVLQRFDQRS

SEQ ID NO: 1475 - protein, 15 aa, Arachis hypogaea
GRIRVLQRFDQRSRQ

SEQ ID NO: 1476 - protein, 15 aa, Arachis hypogaea
VLQRFDQRSRQFQNL

SEQ ID NO: 1477 - protein, 15 aa, Arachis hypogaea
GFSRNTLEAAFNAEF

SEQ ID NO: 1478 - protein, 15 aa, Arachis hypogaea
NGRIRVLQRFDQRSR

SEQ ID NO: 1479 - protein, 15 aa, Arachis hypogaea
SYLQGFSRNTLEAAF

SEQ ID NO: 1480 - protein, 15 aa, Arachis hypogaea
RIRVLQRFDQRSRQF

SEQ ID NO: 1481 - protein, 15 aa, Arachis hypogaea
LQRFDQRSRQFQNLQ

SEQ ID NO: 1482 - protein, 15 aa, Arachis hypogaea
GFGINAENNHRIFLA

SEQ ID NO: 1483 - protein, 15 aa, Arachis hypogaea
LLGFGINAENNHRIF

SEQ ID NO: 1484 - protein, 15 aa, Arachis hypogaea
ELHLLGFGINAENNH

SEQ ID NO: 1485 - protein, 15 aa, Arachis hypogaea
QSSYLQGFSRNTLEA

SEQ ID NO: 1486 - protein, 15 aa, Arachis hypogaea
REVRRYTARLKEGDV

SEQ ID NO: 1487 - protein, 15 aa, Arachis hypogaea
LGFGINAENNHRIFL

SEQ ID NO: 1488 - protein, 15 aa, Arachis hypogaea
VRRYTARLKEGDVFI

SEQ ID NO: 1489 - protein, 15 aa, Arachis hypogaea
DQSSYLQGFSRNTLE

SEQ ID NO: 1490 - protein, 15 aa, Arachis hypogaea
DLNLLILRWLGLSAE

SEQ ID NO: 1491 - protein, 15 aa, Arachis hypogaea
NLLILRWLGLSAEYG

SEQ ID NO: 1492 - protein, 15 aa, Arachis hypogaea
LSAEYGNLYRNALFV

SEQ ID NO: 1493 - protein, 15 aa, Arachis hypogaea
GRAHVQVVDSNGNRV

SEQ ID NO: 1494 - protein, 15 aa, Bertholletia excelsa
ILTFLQLSAMKGVLY

SEQ ID NO: 1495 - protein, 15 aa, Bertholletia excelsa
FEWVVFNTNDNALFS

SEQ ID NO: 1496 - protein, 15 aa, Carya illinoinensis
RNFLAGQNNIINQLE

SEQ ID NO: 1497 - protein, 15 aa, Carya illinoinensis
QLQEMDVLVNYAEIK

SEQ ID NO: 1498 - protein, 15 aa, Carya illinoinensis
LARGDIFVIPAGHPI

SEQ ID NO: 1499 - protein, 15 aa, Carya illinoinensis
YFHSQGLRSRHESGE

SEQ ID NO: 1500 - protein, 15 aa, Carya illinoinensis
REAKELSFNMPREEI

SEQ ID NO: 1501 - protein, 15 aa, Carya illinoinensis
NNPGQFREYYAAGAQ

SEQ ID NO: 1502 - protein, 15 aa, Carya illinoinensis
DVLVNYAEIKRGAMM

SEQ ID NO: 1503 - protein, 15 aa, Carya illinoinensis
LVAALNTPRDRLERF

SEQ ID NO: 1504 - protein, 15 aa, Carya illinoinensis
FSNDILVAALNTPRD

SEQ ID NO: 1505 - protein, 15 aa, Carya illinoinensis
LTFVSQERRESFNLE

SEQ ID NO: 1506 - protein, 15 aa, Carya illinoinensis
YLERFTERTELLRGI

SEQ ID NO: 1507 - protein, 15 aa, Carya illinoinensis
EEEQQRHNPYYFHSQ

SEQ ID NO: 1508 - protein, 15 aa, Carya illinoinensis
ARGDIFVIPAGHPIA

SEQ ID NO: 1509 - protein, 15 aa, Carya illinoinensis
QRYEQCQQQCERQRR

SEQ ID NO: 1510 - protein, 15 aa, Carya illinoinensis
LRVFSNDILVAALNT

SEQ ID NO: 1511 - protein, 15 aa, Carya illinoinensis
NNQRNFLAGQNNIIN

SEQ ID NO: 1512 - protein, 15 aa, Carya illinoinensis
QCQQQCERQRRGQEQ

SEQ ID NO: 1513 - protein, 15 aa, Carya illinoinensis
TFVSQERRESFNLEY

SEQ ID NO: 1514 - protein, 15 aa, Carya illinoinensis
RGRATLTFVSQERRE

SEQ ID NO: 1515 - protein, 15 aa, Carya illinoinensis
AEIKRGAMMVPHYNS

SEQ ID NO: 1516 - protein, 15 aa, Carya illinoinensis
SYLRVFSNDILVAAL

SEQ ID NO: 1517 - protein, 15 aa, Carya illinoinensis
PYYFHSQGLRSRHES

SEQ ID NO: 1518 - protein, 15 aa, Carya illinoinensis
NQRNFLAGQNNIINQ

SEQ ID NO: 1519 - protein, 15 aa, Carya illinoinensis
EQRYEQCQQQCERQR

SEQ ID NO: 1520 - protein, 15 aa, Carya illinoinensis
VYVVEGTGRFEMACP

SEQ ID NO: 1521 - protein, 15 aa, Carya illinoinensis
RLARGDIFVIPAGHP

SEQ ID NO: 1522 - protein, 15 aa, Carya illinoinensis
TESYLRVFSNDILVA

SEQ ID NO: 1523 - protein, 15 aa, Carya illinoinensis
QKVTARLARGDIFVI

SEQ ID NO: 1524 - protein, 15 aa, Carya illinoinensis
ILVAALNTPRDRLER

SEQ ID NO: 1525 - protein, 15 aa, Carya illinoinensis
FQKVTARLARGDIFV

SEQ ID NO: 1526 - protein, 15 aa, Carya illinoinensis
GRFEMACPHDVSSQS

SEQ ID NO: 1527 - protein, 15 aa, Carya illinoinensis
MDVLVNYAEIKRGAM

SEQ ID NO: 1528 - protein, 15 aa, Carya illinoinensis
YYFHSQGLRSRHESG

SEQ ID NO: 1529 - protein, 15 aa, Carya illinoinensis
QCQQRCERQYKEQQG

SEQ ID NO: 1530 - protein, 15 aa, Carya illinoinensis
RGREEEQQRHNPYYF

SEQ ID NO: 1531 - protein, 15 aa, Carya illinoinensis
STESYLRVFSNDILV

SEQ ID NO: 1532 - protein, 15 aa, Carya illinoinensis
SSTGQFQKVTARLAR

SEQ ID NO: 1533 - protein, 15 aa, Carya illinoinensis
LQEMDVLVNYAEIKR

SEQ ID NO: 1534 - protein, 15 aa, Carya illinoinensis
SVIVVTRGRATLTFV

SEQ ID NO: 1535 - protein, 15 aa, Carya illinoinensis
NPYYFHSQGLRSRHE

SEQ ID NO: 1536 - protein, 15 aa, Carya illinoinensis
MERQSRRGQGRDHPL

SEQ ID NO: 1537 - protein, 15 aa, Carya illinoinensis
NYRVVILEANPNTFV

SEQ ID NO: 1538 - protein, 15 aa, Carya illinoinensis
PEQRYEQCQQQCERQ

SEQ ID NO: 1539 - protein, 15 aa, Carya illinoinensis
PYHKDAESVIVVTRG

SEQ ID NO: 1540 - protein, 15 aa, Carya illinoinensis
VPMERQSRRGQGRDH

SEQ ID NO: 1541 - protein, 15 aa, Carya illinoinensis
VESYFVPMERQSRRG

SEQ ID NO: 1542 - protein, 15 aa, Carya illinoinensis
RFTERTELLRGIENY

SEQ ID NO: 1543 - protein, 15 aa, Carya illinoinensis
PGQFREYYAAGAQST

SEQ ID NO: 1544 - protein, 15 aa, Carya illinoinensis
QPVNNPGQFREYYAA

SEQ ID NO: 1545 - protein, 15 aa, Carya illinoinensis
FVIPAGHPIAITASQ

SEQ ID NO: 1546 - protein, 15 aa, Carya illinoinensis
CQQRCERQYKEQQGR

SEQ ID NO: 1547 - protein, 15 aa, Carya illinoinensis
MVKLLQPVNNPGQFR

SEQ ID NO: 1548 - protein, 15 aa, Carya illinoinensis
ENYRVVILEANPNTF

SEQ ID NO: 1549 - protein, 15 aa, Carya illinoinensis
IEEIFERQVESYFVP

SEQ ID NO: 1550 - protein, 15 aa, Carya illinoinensis
QFQKVTARLARGDIF

SEQ ID NO: 1551 - protein, 15 aa, Carya illinoinensis
TGRFEMACPHDVSSQ

SEQ ID NO: 1552 - protein, 15 aa, Carya illinoinensis
TLTFVSQERRESFNL

SEQ ID NO: 1553 - protein, 15 aa, Carya illinoinensis
ESYLRVFSNDILVAA

SEQ ID NO: 1554 - protein, 15 aa, Carya illinoinensis
ESRGREEEQQRHNPY

SEQ ID NO: 1555 - protein, 15 aa, Carya illinoinensis
VPHYNSKATVVVYVV

SEQ ID NO: 1556 - protein, 15 aa, Carya illinoinensis
SSQSYEYKGRREQEE

SEQ ID NO: 1557 - protein, 15 aa, Carya illinoinensis
ALNTPRDRLERFFDQ

SEQ ID NO: 1558 - protein, 15 aa, Carya illinoinensis
VTARLARGDIFVIPA

SEQ ID NO: 1559 - protein, 15 aa, Carya illinoinensis
SYFVPMERQSRRGQG

SEQ ID NO: 1560 - protein, 15 aa, Carya illinoinensis
ARLARGDIFVIPAGH

SEQ ID NO: 1561 - protein, 15 aa, Carya illinoinensis
IKRGAMMVPHYNSKA

SEQ ID NO: 1562 - protein, 15 aa, Carya illinoinensis
VVVYVVEGTGRFEMA

SEQ ID NO: 1563 - protein, 15 aa, Carya illinoinensis
VNYAEIKRGAMMVPH

SEQ ID NO: 1564 - protein, 15 aa, Carya illinoinensis
GQFREYYAAGAQSTE

SEQ ID NO: 1565 - protein, 15 aa, Carya illinoinensis
MVPHYNSKATVVVYV

SEQ ID NO: 1566 - protein, 15 aa, Carya illinoinensis
SYSNQFGQFFEACPE

SEQ ID NO: 1567 - protein, 15 aa, Carya illinoinensis
SFNMPREEIEEIFER

SEQ ID NO: 1568 - protein, 15 aa, Carya illinoinensis
VVTRGRATLTFVSQE

SEQ ID NO: 1569 - protein, 15 aa, Carya illinoinensis
EIEEIFERQVESYFV

SEQ ID NO: 1570 - protein, 15 aa, Carya illinoinensis
DAESVIVVTRGRATL

SEQ ID NO: 1571 - protein, 15 aa, Carya illinoinensis
WGRRSSGGPISLKSQ

SEQ ID NO: 1572 - protein, 15 aa, Carya illinoinensis
HNPYYFHSQGLRSRH

SEQ ID NO: 1573 - protein, 15 aa, Carya illinoinensis
VIVVTRGRATLTFVS

SEQ ID NO: 1574 - protein, 15 aa, Carya illinoinensis
QSPERQRQCQQRCER

SEQ ID NO: 1575 - protein, 15 aa, Carya illinoinensis
ESVIVVTRGRATLTF

SEQ ID NO: 1576 - protein, 15 aa, Carya illinoinensis
FEMACPHDVSSQSYE

SEQ ID NO: 1577 - protein, 15 aa, Carya illinoinensis
KDAESVIVVTRGRAT

SEQ ID NO: 1578 - protein, 15 aa, Carya illinoinensis
GRRSSGGPISLKSQR

SEQ ID NO: 1579 - protein, 15 aa, Carya illinoinensis
DPEQRYEQCQQQCER

SEQ ID NO: 1580 - protein, 15 aa, Carya illinoinensis
DILVAALNTPRDRLE

SEQ ID NO: 1581 - protein, 15 aa, Carya illinoinensis
NDILVAALNTPRDRL

SEQ ID NO: 1582 - protein, 15 aa, Carya illinoinensis
LVNYAEIKRGAMMVP

SEQ ID NO: 1583 - protein, 15 aa, Carya illinoinensis
ERQRQCQQRCERQYK

SEQ ID NO: 1584 - protein, 15 aa, Carya illinoinensis
EEQQRHNPYYFHSQG

SEQ ID NO: 1585 - protein, 15 aa, Carya illinoinensis
SNDILVAALNTPRDR

SEQ ID NO: 1586 - protein, 15 aa, Carya illinoinensis
VTRGRATLTFVSQER

SEQ ID NO: 1587 - protein, 15 aa, Carya illinoinensis
IINQLEREAKELSFN

SEQ ID NO: 1588 - protein, 15 aa, Carya illinoinensis
INQLEREAKELSFNM

SEQ ID NO: 1589 - protein, 15 aa, Carya illinoinensis
TGQFQKVTARLARGD

SEQ ID NO: 1590 - protein, 15 aa, Carya illinoinensis
ESYFVPMERQSRRGQ

SEQ ID NO: 1591 - protein, 15 aa, Carya illinoinensis
EQQRHNPYYFHSQGL

SEQ ID NO: 1592 - protein, 15 aa, Carya illinoinensis
GQFQKVTARLARGDI

SEQ ID NO: 1593 - protein, 15 aa, Carya illinoinensis
STGQFQKVTARLARG

SEQ ID NO: 1594 - protein, 15 aa, Carya illinoinensis
RFEMACPHDVSSQSY

SEQ ID NO: 1595 - protein, 15 aa, Carya illinoinensis
MMVPHYNSKATVVVY

SEQ ID NO: 1596 - protein, 15 aa, Carya illinoinensis
YFVPMERQSRRGQGR

SEQ ID NO: 1597 - protein, 15 aa, Carya illinoinensis
PRDRLERFFDQQEQR

SEQ ID NO: 1598 - protein, 15 aa, Carya illinoinensis
HKDAESVIVVTRGRA

SEQ ID NO: 1599 - protein, 15 aa, Carya illinoinensis
VFSNDILVAALNTPR

SEQ ID NO: 1600 - protein, 15 aa, Carya illinoinensis
IFVIPAGHPIAITAS

SEQ ID NO: 1601 - protein, 15 aa, Carya illinoinensis
QRNFLAGQNNIINQL

SEQ ID NO: 1602 - protein, 15 aa, Carya illinoinensis
IVVTRGRATLTFVSQ

SEQ ID NO: 1603 - protein, 15 aa, Carya illinoinensis
RYEQCQQQCERQRRG

SEQ ID NO: 1604 - protein, 15 aa, Carya illinoinensis
RRESFNLEYGDVIRV

SEQ ID NO: 1605 - protein, 15 aa, Carya illinoinensis
EGTGRFEMACPHDVS

SEQ ID NO: 1606 - protein, 15 aa, Carya illinoinensis
PHYNSKATVVVYVVE

SEQ ID NO: 1607 - protein, 15 aa, Carya illinoinensis
EMDVLVNYAEIKRGA

SEQ ID NO: 1608 - protein, 15 aa, Carya illinoinensis
QEMDVLVNYAEIKRG

SEQ ID NO: 1609 - protein, 15 aa, Carya illinoinensis
AGHPIAITASQNENL

SEQ ID NO: 1610 - protein, 15 aa, Carya illinoinensis
YRVVILEANPNTFVL

SEQ ID NO: 1611 - protein, 15 aa, Carya illinoinensis
RDRLERFFDQQEQRE

SEQ ID NO: 1612 - protein, 15 aa, Carya illinoinensis
SRGREEEQQRHNPYY

SEQ ID NO: 1613 - protein, 15 aa, Carya illinoinensis
VKLLQPVNNPGQFRE

SEQ ID NO: 1614 - protein, 15 aa, Carya illinoinensis
RQRQCQQRCERQYKE

SEQ ID NO: 1615 - protein, 15 aa, Carya illinoinensis
FVPMERQSRRGQGRD

SEQ ID NO: 1616 - protein, 15 aa, Carya illinoinensis
AESVIVVTRGRATLT

SEQ ID NO: 1617 - protein, 15 aa, Carya illinoinensis
RVFSNDILVAALNTP

SEQ ID NO: 1618 - protein, 15 aa, Carya illinoinensis
KELSFNMPREEIEEI

SEQ ID NO: 1619 - protein, 15 aa, Carya illinoinensis
GAMMVPHYNSKATVV

SEQ ID NO: 1620 - protein, 15 aa, Carya illinoinensis
RHNPYYFHSQGLRSR

SEQ ID NO: 1621 - protein, 15 aa, Carya illinoinensis
YSNQFGQFFEACPEE

SEQ ID NO: 1622 - protein, 15 aa, Carya illinoinensis
YLRVFSNDILVAALN

SEQ ID NO: 1623 - protein, 15 aa, Carya illinoinensis
ETFEESQRQSQQGQR

SEQ ID NO: 1624 - protein, 15 aa, Carya illinoinensis
GCPETFEESQRQSQQ

SEQ ID NO: 1625 - protein, 15 aa, Carya illinoinensis
HWCYNDGSSPVVAIF

SEQ ID NO: 1626 - protein, 15 aa, Carya illinoinensis
LVYIARGRGITGVLF

SEQ ID NO: 1627 - protein, 15 aa, Carya illinoinensis
KPILLSIYLCLIIVA

SEQ ID NO: 1628 - protein, 15 aa, Carya illinoinensis
AKPILLSIYLCLIIV

SEQ ID NO: 1629 - protein, 15 aa, Carya illinoinensis
WCYNDGSSPVVAIFL

SEQ ID NO: 1630 - protein, 15 aa, Carya illinoinensis
APQLVYIARGRGITG

SEQ ID NO: 1631 - protein, 15 aa, Carya illinoinensis
AEFLADAFNVDTETA

SEQ ID NO: 1632 - protein, 15 aa, Carya illinoinensis
QLVYIARGRGITGVL

SEQ ID NO: 1633 - protein, 15 aa, Carya illinoinensis
TFEESQRQSQQGQRR

SEQ ID NO: 1634 - protein, 15 aa, Carya illinoinensis
SNAPQLVYIARGRGI

SEQ ID NO: 1635 - protein, 15 aa, Carya illinoinensis
CPETFEESQRQSQQG

SEQ ID NO: 1636 - protein, 15 aa, Carya illinoinensis
HKFGQCQLNRLDALE

SEQ ID NO: 1637 - protein, 15 aa, Carya illinoinensis
CLAQSGGRQQHKFGQ

SEQ ID NO: 1638 - protein, 15 aa, Carya illinoinensis
FLADAFNVDTETARR

SEQ ID NO: 1639 - protein, 15 aa, Carya illinoinensis
ILLSIYLCLIIVALF

SEQ ID NO: 1640 - protein, 15 aa, Carya illinoinensis
PQLVYIARGRGITGV

SEQ ID NO: 1641 - protein, 15 aa, Carya illinoinensis
NAPQLVYIARGRGIT

SEQ ID NO: 1642 - protein, 15 aa, Corylus avellana
EGEGFFEMACPHLSS

SEQ ID NO: 1643 - protein, 15 aa, Corylus avellana
RGVVFVAPAGHPVAV

SEQ ID NO: 1644 - protein, 15 aa, Corylus avellana
VVVEGEGFFEMACPH

SEQ ID NO: 1645 - protein, 15 aa, Corylus avellana
SVVVEGEGFFEMACP

SEQ ID NO: 1646 - protein, 15 aa, Corylus avellana
EQQGEGNNVFSGFDA

SEQ ID NO: 1647 - protein, 15 aa, Corylus avellana
FLADAFNVDVDTARR

SEQ ID NO: 1648 - protein, 15 aa, Corylus avellana
QEQQGEGNNVFSGFD

SEQ ID NO: 1649 - protein, 15 aa, Corylus avellana
PDDVLANAFQISREE

SEQ ID NO: 1650 - protein, 15 aa, Corylus avellana
FEWVAFKTNDNAQIS

SEQ ID NO: 1651 - protein, 15 aa, Corylus avellana
AEFLADAFNVDVDTA

SEQ ID NO: 1652 - protein, 15 aa, Corylus avellana
EEARRLKYNRQETTL

SEQ ID NO: 1653 - protein, 15 aa, Corylus avellana
ISREEARRLKYNRQE

SEQ ID NO: 1654 - protein, 15 aa, Corylus avellana
NTVNSNTLPVLRWLQ

SEQ ID NO: 1655 - protein, 15 aa, Corylus avellana
ARRLKYNRQETTLVR

SEQ ID NO: 1656 - protein, 15 aa, Corylus avellana
EFLADAFNVDVDTAR

SEQ ID NO: 1657 - protein, 15 aa, Corylus avellana
DVNGFEETICSLRLR

SEQ ID NO: 1658 - protein, 15 aa, Corylus avellana
GRARVQVVDDNGNTV

SEQ ID NO: 1659 - protein, 15 aa, Corylus avellana
LPAGVAHWCYNDGDS

SEQ ID NO: 1660 - protein, 15 aa, Corylus avellana
EARRLKYNRQETTLV

SEQ ID NO: 1661 - protein, 15 aa, Corylus avellana
LQLSAERGDLQREGL

SEQ ID NO: 1662 - protein, 15 aa, Corylus avellana
SREEARRLKYNRQET

SEQ ID NO: 1663 - protein, 15 aa, Fagopyrum esculentum
PQGFAVVLKAGREGL

SEQ ID NO: 1664 - protein, 15 aa, Fagopyrum esculentum
CNLKFKQNVNRPSRA

SEQ ID NO: 1665 - protein, 15 aa, Fagopyrum esculentum
ILEFIQLSAQHVVLY

SEQ ID NO: 1666 - protein, 15 aa, Fagopyrum esculentum
AQHVVLYKNAILGPR

SEQ ID NO: 1667 - protein, 15 aa, Fagopyrum esculentum
DNVQRGQILVVPQGF

SEQ ID NO: 1668 - protein, 15 aa, Fagopyrum esculentum
WNLNAHSALYVTRGE

SEQ ID NO: 1669 - protein, 15 aa, Fagopyrum esculentum
HSALYVTRGEGRVQV

SEQ ID NO: 1670 - protein, 15 aa, Fagopyrum esculentum
LPILEFIQLSAQHVV

SEQ ID NO: 1671 - protein, 15 aa, Fagopyrum esculentum
VGDEGRSVFDDNVQR

SEQ ID NO: 1672 - protein, 15 aa, Fagopyrum esculentum
ELKNDDNAITSPIAG

SEQ ID NO: 1673 - protein, 15 aa, Fagopyrum esculentum
EFIQLSAQHVVLYKN

SEQ ID NO: 1674 - protein, 15 aa, Fagopyrum esculentum
SALYVTRGEGRVQVV

SEQ ID NO: 1675 - protein, 15 aa, Fagopyrum esculentum
AITSPIAGKTSVLRA

SEQ ID NO: 1676 - protein, 15 aa, Fagopyrum esculentum
ILGPRWNLNAHSALY

SEQ ID NO: 1677 - protein, 15 aa, Fagopyrum esculentum
LKFKQNVNRPSRADV

SEQ ID NO: 1678 - protein, 15 aa, Fagopyrum esculentum
KFKQNVNRPSRADVF

SEQ ID NO: 1679 - protein, 15 aa, Fagopyrum esculentum
PRWNLNAHSALYVTR

SEQ ID NO: 1680 - protein, 15 aa, Fagopyrum esculentum
EVEVFLPFQSRDEKE

SEQ ID NO: 1681 - protein, 15 aa, Fagopyrum esculentum
VLRAIPVEVLANSYD

SEQ ID NO: 1682 - protein, 15 aa, Fagopyrum esculentum
NPRAGRINTVNSNNL

SEQ ID NO: 1683 - protein, 15 aa, Fagopyrum esculentum
GREGLEWVELKNDDN

SEQ ID NO: 1684 - protein, 15 aa, Fagopyrum esculentum
RPSRADVFNPRAGRI

SEQ ID NO: 1685 - protein, 15 aa, Fagopyrum esculentum
VLKAGREGLEWVELK

SEQ ID NO: 1686 - protein, 15 aa, Fagopyrum esculentum
WVELKNDDNAITSPI

SEQ ID NO: 1687 - protein, 15 aa, Fagopyrum esculentum
HVVLYKNAILGPRWN

SEQ ID NO: 1688 - protein, 15 aa, Fagopyrum esculentum
VTRGEGRVQVVGDEG

SEQ ID NO: 1689 - protein, 15 aa, Fagopyrum esculentum
EQAFCNLKFKQNVNR

SEQ ID NO: 1690 - protein, 15 aa, Fagopyrum esculentum
GFAVVLKAGREGLEW

SEQ ID NO: 1691 - protein, 15 aa, Fagopyrum esculentum
AFRLKNGRQEVEVFL

SEQ ID NO: 1692 - protein, 15 aa, Fagopyrum esculentum
VEVFLPFQSRDEKER

SEQ ID NO: 1693 - protein, 15 aa, Fagopyrum esculentum
NSNNLPILEFIQLSA

SEQ ID NO: 1694 - protein, 15 aa, Fagopyrum esculentum
PIAGKTSVLRAIPVE

SEQ ID NO: 1695 - protein, 15 aa, Fagopyrum esculentum
SVFDDNVQRGQILVV

SEQ ID NO: 1696 - protein, 15 aa, Fagopyrum esculentum
VPGCPETFQSESEFE

SEQ ID NO: 1697 - protein, 15 aa, Fagopyrum esculentum
VLYKNAILGPRWNLN

SEQ ID NO: 1698 - protein, 15 aa, Fagopyrum esculentum
NAILGPRWNLNAHSA

SEQ ID NO: 1699 - protein, 15 aa, Fagopyrum esculentum
RGVQGVVVPGCPETF

SEQ ID NO: 1700 - protein, 15 aa, Fagopyrum esculentum
NTVNSNNLPILEFIQ

SEQ ID NO: 1701 - protein, 15 aa, Fagopyrum esculentum
RAGRINTVNSNNLPI

SEQ ID NO: 1702 - protein, 15 aa, Fagopyrum esculentum
AFCNLKFKQNVNRPS

SEQ ID NO: 1703 - protein, 15 aa, Fagopyrum esculentum
FCNLKFKQNVNRPSR

SEQ ID NO: 1704 - protein, 15 aa, Fagopyrum esculentum
GCPETFQSESEFEYP

SEQ ID NO: 1705 - protein, 15 aa, Fagopyrum esculentum
LYKNAILGPRWNLNA

SEQ ID NO: 1706 - protein, 15 aa, Fagopyrum esculentum
NLNAHSALYVTRGEG

SEQ ID NO: 1707 - protein, 15 aa, Fagopyrum esculentum
VPQGFAVVLKAGREG

SEQ ID NO: 1708 - protein, 15 aa, Fagopyrum esculentum
NLPILEFIQLSAQHV

SEQ ID NO: 1709 - protein, 15 aa, Fagopyrum esculentum
GRVQVVGDEGRSVFD

SEQ ID NO: 1710 - protein, 15 aa, Fagopyrum esculentum
LVVPQGFAVVLKAGR

SEQ ID NO: 1711 - protein, 15 aa, Fagopyrum esculentum
VVPQGFAVVLKAGRE

SEQ ID NO: 1712 - protein, 15 aa, Fagopyrum esculentum
EGLEWVELKNDDNAI

SEQ ID NO: 1713 - protein, 15 aa, Fagopyrum esculentum
GVQGVVVPGCPETFQ

SEQ ID NO: 1714 - protein, 15 aa, Fagopyrum esculentum
IAGKTSVLRAIPVEV

SEQ ID NO: 1715 - protein, 15 aa, Fagopyrum esculentum
VVLYKNAILGPRWNL

SEQ ID NO: 1716 - protein, 15 aa, Fagopyrum esculentum
NVNRPSRADVFNPRA

SEQ ID NO: 1717 - protein, 15 aa, Fagopyrum esculentum
ITSPIAGKTSVLRAI

SEQ ID NO: 1718 - protein, 15 aa, Fagopyrum esculentum
LRAIPVEVLANSYDI

SEQ ID NO: 1719 - protein, 15 aa, Fagopyrum esculentum
VVLKAGREGLEWVEL

SEQ ID NO: 1720 - protein, 15 aa, Fagopyrum esculentum
GPRWNLNAHSALYVT

SEQ ID NO: 1721 - protein, 15 aa, Fagopyrum esculentum
VNSNNLPILEFIQLS

SEQ ID NO: 1722 - protein, 15 aa, Fagopyrum esculentum
FRLKNGRQEVEVFLP

SEQ ID NO: 1723 - protein, 15 aa, Fagopyrum esculentum
LEFIQLSAQHVVLYK

SEQ ID NO: 1724 - protein, 15 aa, Fagopyrum esculentum
YKNAILGPRWNLNAH

SEQ ID NO: 1725 - protein, 15 aa, Fagopyrum esculentum
FNPRAGRINTVNSNN

SEQ ID NO: 1726 - protein, 15 aa, Fagopyrum esculentum
KNGRQEVEVFLPFQS

SEQ ID NO: 1727 - protein, 15 aa, Fagopyrum esculentum
GDEGRSVFDDNVQRG

SEQ ID NO: 1728 - protein, 15 aa, Fagopyrum esculentum
LGPRWNLNAHSALYV

SEQ ID NO: 1729 - protein, 15 aa, Fagopyrum esculentum
AGKTSVLRAIPVEVL

SEQ ID NO: 1730 - protein, 15 aa, Fagopyrum esculentum
SNNLPILEFIQLSAQ

SEQ ID NO: 1731 - protein, 15 aa, Fagopyrum esculentum
ILVVPQGFAVVLKAG

SEQ ID NO: 1732 - protein, 15 aa, Fagopyrum esculentum
VFNPRAGRINTVNSN

SEQ ID NO: 1733 - protein, 15 aa, Fagopyrum esculentum
RWNLNAHSALYVTRG

SEQ ID NO: 1734 - protein, 15 aa, Fagopyrum esculentum
SRADVFNPRAGRINT

SEQ ID NO: 1735 - protein, 15 aa, Fagopyrum esculentum
QHVVLYKNAILGPRW

SEQ ID NO: 1736 - protein, 15 aa, Fagopyrum esculentum
NAITSPIAGKTSVLR

SEQ ID NO: 1737 - protein, 15 aa, Fagopyrum esculentum
PILEFIQLSAQHVVL

SEQ ID NO: 1738 - protein, 15 aa, Fagopyrum esculentum
EGRSVFDDNVQRGQI

SEQ ID NO: 1739 - protein, 15 aa, Fagopyrum esculentum
QGFAVVLKAGREGLE

SEQ ID NO: 1740 - protein, 15 aa, Fagopyrum esculentum
RSVFDDNVQRGQILV

SEQ ID NO: 1741 - protein, 15 aa, Fagopyrum esculentum
KTSVLRAIPVEVLAN

SEQ ID NO: 1742 - protein, 15 aa, Fagopyrum esculentum
FAVVLKAGREGLEWV

SEQ ID NO: 1743 - protein, 15 aa, Fagopyrum esculentum
FDDNVQRGQILVVPQ

SEQ ID NO: 1744 - protein, 15 aa, Fagopyrum esculentum
TVNSNNLPILEFIQL

SEQ ID NO: 1745 - protein, 15 aa, Fagopyrum esculentum
DVFNPRAGRINTVNS

SEQ ID NO: 1746 - protein, 15 aa, Fagopyrum esculentum
FKQNVNRPSRADVFN

SEQ ID NO: 1747 - protein, 15 aa, Fagopyrum esculentum
GKTSVLRAIPVEVLA

SEQ ID NO: 1748 - protein, 15 aa, Fagopyrum esculentum
NLKFKQNVNRPSRAD

SEQ ID NO: 1749 - protein, 15 aa, Fagopyrum esculentum
INTVNSNNLPILEFI

SEQ ID NO: 1750 - protein, 15 aa, Fagopyrum esculentum
LKNDDNAITSPIAGK

SEQ ID NO: 1751 - protein, 15 aa, Fagopyrum esculentum
ADIASRQAGRIHSVD

SEQ ID NO: 1752 - protein, 15 aa, Fagopyrum tataricum
PQGFAVVLKAGREGL

SEQ ID NO: 1753 - protein, 15 aa, Fagopyrum tataricum
CNLKFKQNVNRPSRA

SEQ ID NO: 1754 - protein, 15 aa, Fagopyrum tataricum
ILEFIQLSAQHVVLY

SEQ ID NO: 1755 - protein, 15 aa, Fagopyrum tataricum
AQHVVLYKNAILGPR

SEQ ID NO: 1756 - protein, 15 aa, Fagopyrum tataricum
DNVQRGQILVVPQGF

SEQ ID NO: 1757 - protein, 15 aa, Fagopyrum tataricum
WNLNAHSALYVTRGE

SEQ ID NO: 1758 - protein, 15 aa, Fagopyrum tataricum
HSALYVTRGEGRVQV

SEQ ID NO: 1759 - protein, 15 aa, Fagopyrum tataricum
LPILEFIQLSAQHVV

SEQ ID NO: 1760 - protein, 15 aa, Fagopyrum tataricum
VGDEGRSVFDDNVQR

SEQ ID NO: 1761 - protein, 15 aa, Fagopyrum tataricum
ELKNDDNAITSPIAG

SEQ ID NO: 1762 - protein, 15 aa, Fagopyrum tataricum
EFIQLSAQHVVLYKN

SEQ ID NO: 1763 - protein, 15 aa, Fagopyrum tataricum
SALYVTRGEGRVQVV

SEQ ID NO: 1764 - protein, 15 aa, Fagopyrum tataricum
AITSPIAGKTSVLRA

SEQ ID NO: 1765 - protein, 15 aa, Fagopyrum tataricum
ILGPRWNLNAHSALY

SEQ ID NO: 1766 - protein, 15 aa, Fagopyrum tataricum
LKFKQNVNRPSRADV

SEQ ID NO: 1767 - protein, 15 aa, Fagopyrum tataricum
KFKQNVNRPSRADVF

SEQ ID NO: 1768 - protein, 15 aa, Fagopyrum tataricum
PRWNLNAHSALYVTR

SEQ ID NO: 1769 - protein, 15 aa, Fagopyrum tataricum
EVEVFLPFQSRDEKE

SEQ ID NO: 1770 - protein, 15 aa, Fagopyrum tataricum
VLRAIPVEVLANSYD

SEQ ID NO: 1771 - protein, 15 aa, Fagopyrum tataricum
NPRAGRINTVNSNNL

SEQ ID NO: 1772 - protein, 15 aa, Fagopyrum tataricum
GREGLEWVELKNDDN

SEQ ID NO: 1773 - protein, 15 aa, Fagopyrum tataricum
RPSRADVFNPRAGRI

SEQ ID NO: 1774 - protein, 15 aa, Fagopyrum tataricum
VLKAGREGLEWVELK

SEQ ID NO: 1775 - protein, 15 aa, Fagopyrum tataricum
WVELKNDDNAITSPI

SEQ ID NO: 1776 - protein, 15 aa, Fagopyrum tataricum
HVVLYKNAILGPRWN

SEQ ID NO: 1777 - protein, 15 aa, Fagopyrum tataricum
VTRGEGRVQVVGDEG

SEQ ID NO: 1778 - protein, 15 aa, Fagopyrum tataricum
EQAFCNLKFKQNVNR

SEQ ID NO: 1779 - protein, 15 aa, Fagopyrum tataricum
GFAVVLKAGREGLEW

SEQ ID NO: 1780 - protein, 15 aa, Fagopyrum tataricum
AFRLKNGRQEVEVFL

SEQ ID NO: 1781 - protein, 15 aa, Fagopyrum tataricum
VEVFLPFQSRDEKER

SEQ ID NO: 1782 - protein, 15 aa, Fagopyrum tataricum
NSNNLPILEFIQLSA

SEQ ID NO: 1783 - protein, 15 aa, Fagopyrum tataricum
PIAGKTSVLRAIPVE

SEQ ID NO: 1784 - protein, 15 aa, Fagopyrum tataricum
SVFDDNVQRGQILVV

SEQ ID NO: 1785 - protein, 15 aa, Fagopyrum tataricum
VPGCPETFQSESEFE

SEQ ID NO: 1786 - protein, 15 aa, Fagopyrum tataricum
VLYKNAILGPRWNLN

SEQ ID NO: 1787 - protein, 15 aa, Fagopyrum tataricum
NAILGPRWNLNAHSA

SEQ ID NO: 1788 - protein, 15 aa, Fagopyrum tataricum
RGVQGVVVPGCPETF

SEQ ID NO: 1789 - protein, 15 aa, Fagopyrum tataricum
NTVNSNNLPILEFIQ

SEQ ID NO: 1790 - protein, 15 aa, Fagopyrum tataricum
RAGRINTVNSNNLPI

SEQ ID NO: 1791 - protein, 15 aa, Fagopyrum tataricum
AFCNLKFKQNVNRPS

SEQ ID NO: 1792 - protein, 15 aa, Fagopyrum tataricum
FCNLKFKQNVNRPSR

SEQ ID NO: 1793 - protein, 15 aa, Fagopyrum tataricum
GCPETFQSESEFEYP

SEQ ID NO: 1794 - protein, 15 aa, Fagopyrum tataricum
LYKNAILGPRWNLNA

SEQ ID NO: 1795 - protein, 15 aa, Fagopyrum tataricum
NLNAHSALYVTRGEG

SEQ ID NO: 1796 - protein, 15 aa, Fagopyrum tataricum
VPQGFAVVLKAGREG

SEQ ID NO: 1797 - protein, 15 aa, Fagopyrum tataricum
NLPILEFIQLSAQHV

SEQ ID NO: 1798 - protein, 15 aa, Fagopyrum tataricum
GRVQVVGDEGRSVFD

SEQ ID NO: 1799 - protein, 15 aa, Fagopyrum tataricum
LVVPQGFAVVLKAGR

SEQ ID NO: 1800 - protein, 15 aa, Fagopyrum tataricum
VVPQGFAVVLKAGRE

SEQ ID NO: 1801 - protein, 15 aa, Fagopyrum tataricum
EGLEWVELKNDDNAI

SEQ ID NO: 1802 - protein, 15 aa, Fagopyrum tataricum
GVQGVVVPGCPETFQ

SEQ ID NO: 1803 - protein, 15 aa, Fagopyrum tataricum
IAGKTSVLRAIPVEV

SEQ ID NO: 1804 - protein, 15 aa, Fagopyrum tataricum
VVLYKNAILGPRWNL

SEQ ID NO: 1805 - protein, 15 aa, Fagopyrum tataricum
NVNRPSRADVFNPRA

SEQ ID NO: 1806 - protein, 15 aa, Fagopyrum tataricum
ITSPIAGKTSVLRAI

SEQ ID NO: 1807 - protein, 15 aa, Fagopyrum tataricum
LRAIPVEVLANSYDI

SEQ ID NO: 1808 - protein, 15 aa, Fagopyrum tataricum
VVLKAGREGLEWVEL

SEQ ID NO: 1809 - protein, 15 aa, Fagopyrum tataricum
GPRWNLNAHSALYVT

SEQ ID NO: 1810 - protein, 15 aa, Fagopyrum tataricum
VNSNNLPILEFIQLS

SEQ ID NO: 1811 - protein, 15 aa, Fagopyrum tataricum
FRLKNGRQEVEVFLP

SEQ ID NO: 1812 - protein, 15 aa, Fagopyrum tataricum
LEFIQLSAQHVVLYK

SEQ ID NO: 1813 - protein, 15 aa, Fagopyrum tataricum
YKNAILGPRWNLNAH

SEQ ID NO: 1814 - protein, 15 aa, Fagopyrum tataricum
FNPRAGRINTVNSNN

SEQ ID NO: 1815 - protein, 15 aa, Fagopyrum tataricum
KNGRQEVEVFLPFQS

SEQ ID NO: 1816 - protein, 15 aa, Fagopyrum tataricum
GDEGRSVFDDNVQRG

SEQ ID NO: 1817 - protein, 15 aa, Fagopyrum tataricum
LGPRWNLNAHSALYV

SEQ ID NO: 1818 - protein, 15 aa, Fagopyrum tataricum
AGKTSVLRAIPVEVL

SEQ ID NO: 1819 - protein, 15 aa, Fagopyrum tataricum
SNNLPILEFIQLSAQ

SEQ ID NO: 1820 - protein, 15 aa, Fagopyrum tataricum
ILVVPQGFAVVLKAG

SEQ ID NO: 1821 - protein, 15 aa, Fagopyrum tataricum
VFNPRAGRINTVNSN

SEQ ID NO: 1822 - protein, 15 aa, Fagopyrum tataricum
RWNLNAHSALYVTRG

SEQ ID NO: 1823 - protein, 15 aa, Fagopyrum tataricum
SRADVFNPRAGRINT

SEQ ID NO: 1824 - protein, 15 aa, Fagopyrum tataricum
QHVVLYKNAILGPRW

SEQ ID NO: 1825 - protein, 15 aa, Fagopyrum tataricum
NAITSPIAGKTSVLR

SEQ ID NO: 1826 - protein, 15 aa, Fagopyrum tataricum
PILEFIQLSAQHVVL

SEQ ID NO: 1827 - protein, 15 aa, Fagopyrum tataricum
EGRSVFDDNVQRGQI

SEQ ID NO: 1828 - protein, 15 aa, Fagopyrum tataricum
QGFAVVLKAGREGLE

SEQ ID NO: 1829 - protein, 15 aa, Fagopyrum tataricum
RSVFDDNVQRGQILV

SEQ ID NO: 1830 - protein, 15 aa, Fagopyrum tataricum
KTSVLRAIPVEVLAN

SEQ ID NO: 1831 - protein, 15 aa, Fagopyrum tataricum
FAVVLKAGREGLEWV

SEQ ID NO: 1832 - protein, 15 aa, Fagopyrum tataricum
FDDNVQRGQILVVPQ

SEQ ID NO: 1833 - protein, 15 aa, Fagopyrum tataricum
TVNSNNLPILEFIQL

SEQ ID NO: 1834 - protein, 15 aa, Fagopyrum tataricum
DVFNPRAGRINTVNS

SEQ ID NO: 1835 - protein, 15 aa, Fagopyrum tataricum
FKQNVNRPSRADVFN

SEQ ID NO: 1836 - protein, 15 aa, Fagopyrum tataricum
GKTSVLRAIPVEVLA

SEQ ID NO: 1837 - protein, 15 aa, Fagopyrum tataricum
NLKFKQNVNRPSRAD

SEQ ID NO: 1838 - protein, 15 aa, Fagopyrum tataricum
INTVNSNNLPILEFI

SEQ ID NO: 1839 - protein, 15 aa, Fagopyrum tataricum
LKNDDNAITSPIAGK

SEQ ID NO: 1840 - protein, 15 aa, Glycine max
FAIGINAENNQRNFL

SEQ ID NO: 1841 - protein, 15 aa, Glycine max
PHFNSKAIVILVINE

SEQ ID NO: 1842 - protein, 15 aa, Glycine max
YGRIRVLQRFNQRSP

SEQ ID NO: 1843 - protein, 15 aa, Glycine max
EAQQSYLQGFSRNIL

SEQ ID NO: 1844 - protein, 15 aa, Glycine max
FFLSSTEAQQSYLQG

SEQ ID NO: 1845 - protein, 15 aa, Glycine max
FLSSTEAQQSYLQGF

SEQ ID NO: 1846 - protein, 15 aa, Glycine max
NLNFFAIGINAENNQ

SEQ ID NO: 1847 - protein, 15 aa, Glycine max
NEGDANIELVGLKEQ

SEQ ID NO: 1848 - protein, 15 aa, Glycine max
KAIVILVINEGDANI

SEQ ID NO: 1849 - protein, 15 aa, Glycine max
ESFFLSSTEAQQSYL

SEQ ID NO: 1850 - protein, 15 aa, Glycine max
RIRVLQRFNQRSPQL

SEQ ID NO: 1851 - protein, 15 aa, Glycine max
SNLNFFAIGINAENN

SEQ ID NO: 1852 - protein, 15 aa, Glycine max
SSTEAQQSYLQGFSR

SEQ ID NO: 1853 - protein, 15 aa, Glycine max
NQYGRIRVLQRFNQR

SEQ ID NO: 1854 - protein, 15 aa, Glycine max
GRIRVLQRFNQRSPQ

SEQ ID NO: 1855 - protein, 15 aa, Glycine max
LLLPHFNSKAIVILV

SEQ ID NO: 1856 - protein, 15 aa, Glycine max
SIVDMNEGALLLPHF

SEQ ID NO: 1857 - protein, 15 aa, Glycine max
FESFFLSSTEAQQSY

SEQ ID NO: 1858 - protein, 15 aa, Glycine max
SFFLSSTEAQQSYLQ

SEQ ID NO: 1859 - protein, 15 aa, Glycine max
TSNLNFFAIGINAEN

SEQ ID NO: 1860 - protein, 15 aa, Glycine max
TEAQQSYLQGFSRNI

SEQ ID NO: 1861 - protein, 15 aa, Glycine max
ATSNLNFFAIGINAE

SEQ ID NO: 1862 - protein, 15 aa, Glycine max
FFAIGINAENNQRNF

SEQ ID NO: 1863 - protein, 15 aa, Glycine max
LNFFAIGINAENNQR

SEQ ID NO: 1864 - protein, 15 aa, Glycine max
NFFAIGINAENNQRN

SEQ ID NO: 1865 - protein, 15 aa, Glycine max
KPNTLLLPNHADADY

SEQ ID NO: 1866 - protein, 15 aa, Glycine max
RFESFFLSSTEAQQS

SEQ ID NO: 1867 - protein, 15 aa, Glycine max
LSSTEAQQSYLQGFS

SEQ ID NO: 1868 - protein, 15 aa, Glycine max
QYGRIRVLQRFNQRS

SEQ ID NO: 1869 - protein, 15 aa, Glycine max
LPHFNSKAIVILVIN

SEQ ID NO: 1870 - protein, 15 aa, Glycine max
YKNGIYSPHWNLNAN

SEQ ID NO: 1871 - protein, 15 aa, Glycine max
VVLYKNGIYSPHWNL

SEQ ID NO: 1872 - protein, 15 aa, Glycine max
RISTLNSLTLPALRQ

SEQ ID NO: 1873 - protein, 15 aa, Glycine max
STLNSLTLPALRQFQ

SEQ ID NO: 1874 - protein, 15 aa, Glycine max
ISTLNSLTLPALRQF

SEQ ID NO: 1875 - protein, 15 aa, Glycine max
QKIRHFNEGDVLVIP

SEQ ID NO: 1876 - protein, 15 aa, Juglans nigra
EPGQQQRGSGNNVFS

SEQ ID NO: 1877 - protein, 15 aa, Juglans nigra
APQLLYIVKGRGITG

SEQ ID NO: 1878 - protein, 15 aa, Juglans nigra
SREEQEREERKERER

SEQ ID NO: 1879 - protein, 15 aa, Juglans nigra
SNAPQLLYIVKGRGI

SEQ ID NO: 1880 - protein, 15 aa, Juglans nigra
YSNAPQLLYIVKGRG

SEQ ID NO: 1881 - protein, 15 aa, Juglans nigra
REEQEREERKERERE

SEQ ID NO: 1882 - protein, 15 aa, Juglans nigra
NRQESTLVRSRPSSS

SEQ ID NO: 1883 - protein, 15 aa, Juglans nigra
FNRQESTLVRSRPSS

SEQ ID NO: 1884 - protein, 15 aa, Juglans nigra
DPNNQQFQCAGVAVV

SEQ ID NO: 1885 - protein, 15 aa, Juglans nigra
AKPILLSISLCLVAL

SEQ ID NO: 1886 - protein, 15 aa, Juglans nigra
QKIRHFREGDVIAFP

SEQ ID NO: 1887 - protein, 15 aa, Juglans nigra
KPILLSISLCLVALV

SEQ ID NO: 1888 - protein, 15 aa, Juglans nigra
CLAQSGGRQQPRFGE

SEQ ID NO: 1889 - protein, 15 aa, Juglans nigra
QQRGSGNNVFSGFDA

SEQ ID NO: 1890 - protein, 15 aa, Juglans nigra
HWCYNDGDTPVVAVA

SEQ ID NO: 1891 - protein, 15 aa, Juglans regia
QLQEMDVLVNYAEIK

SEQ ID NO: 1892 - protein, 15 aa, Juglans regia
LARGDIFVIPAGHPI

SEQ ID NO: 1893 - protein, 15 aa, Juglans regia
YRVVILDANPNTSML

SEQ ID NO: 1894 - protein, 15 aa, Juglans regia
EEQQRHNPYYFHSQS

SEQ ID NO: 1895 - protein, 15 aa, Juglans regia
ESVAVVTRGRATLTL

SEQ ID NO: 1896 - protein, 15 aa, Juglans regia
VAVVTRGRATLTLVS

SEQ ID NO: 1897 - protein, 15 aa, Juglans regia
DVLVNYAEIKRGAMM

SEQ ID NO: 1898 - protein, 15 aa, Juglans regia
LVAALNTPRDRLERF

SEQ ID NO: 1899 - protein, 15 aa, Juglans regia
GQFREYYAAGAKSPD

SEQ ID NO: 1900 - protein, 15 aa, Juglans regia
FSNDILVAALNTPRD

SEQ ID NO: 1901 - protein, 15 aa, Juglans regia
YLERFTERTELLRGI

SEQ ID NO: 1902 - protein, 15 aa, Juglans regia
VVVYVVEGTGRYEMA

SEQ ID NO: 1903 - protein, 15 aa, Juglans regia
EEEQQRHNPYYFHSQ

SEQ ID NO: 1904 - protein, 15 aa, Juglans regia
ARGDIFVIPAGHPIA

SEQ ID NO: 1905 - protein, 15 aa, Juglans regia
MESYFVPTERQSRRG

SEQ ID NO: 1906 - protein, 15 aa, Juglans regia
QRYEQCQQQCERQRR

SEQ ID NO: 1907 - protein, 15 aa, Juglans regia
LRVFSNDILVAALNT

SEQ ID NO: 1908 - protein, 15 aa, Juglans regia
QCQQQCERQRRGQEQ

SEQ ID NO: 1909 - protein, 15 aa, Juglans regia
EQQRHNPYYFHSQSI

SEQ ID NO: 1910 - protein, 15 aa, Juglans regia
AEIKRGAMMVPHYNS

SEQ ID NO: 1911 - protein, 15 aa, Juglans regia
AESVAVVTRGRATLT

SEQ ID NO: 1912 - protein, 15 aa, Juglans regia
SYLRVFSNDILVAAL

SEQ ID NO: 1913 - protein, 15 aa, Juglans regia
YFVPTERQSRRGQGR

SEQ ID NO: 1914 - protein, 15 aa, Juglans regia
NNQRDFLAGQNNIIN

SEQ ID NO: 1915 - protein, 15 aa, Juglans regia
FVPTERQSRRGQGRD

SEQ ID NO: 1916 - protein, 15 aa, Juglans regia
WGRRSSGGPISLKSE

SEQ ID NO: 1917 - protein, 15 aa, Juglans regia
EQRYEQCQQQCERQR

SEQ ID NO: 1918 - protein, 15 aa, Juglans regia
QRDFLAGQNNIINQL

SEQ ID NO: 1919 - protein, 15 aa, Juglans regia
RLARGDIFVIPAGHP

SEQ ID NO: 1920 - protein, 15 aa, Juglans regia
SYFVPTERQSRRGQG

SEQ ID NO: 1921 - protein, 15 aa, Juglans regia
QSYLRVFSNDILVAA

SEQ ID NO: 1922 - protein, 15 aa, Juglans regia
QKVTARLARGDIFVI

SEQ ID NO: 1923 - protein, 15 aa, Juglans regia
ILVAALNTPRDRLER

SEQ ID NO: 1924 - protein, 15 aa, Juglans regia
NNPGQFREYYAAGAK

SEQ ID NO: 1925 - protein, 15 aa, Juglans regia
HKDAESVAVVTRGRA

SEQ ID NO: 1926 - protein, 15 aa, Juglans regia
PGQFREYYAAGAKSP

SEQ ID NO: 1927 - protein, 15 aa, Juglans regia
VVTRGRATLTLVSQE

SEQ ID NO: 1928 - protein, 15 aa, Juglans regia
PSYSNQFGQFFEACP

SEQ ID NO: 1929 - protein, 15 aa, Juglans regia
YYFHSQSIRSRHESE

SEQ ID NO: 1930 - protein, 15 aa, Juglans regia
FQKVTARLARGDIFV

SEQ ID NO: 1931 - protein, 15 aa, Juglans regia
MDVLVNYAEIKRGAM

SEQ ID NO: 1932 - protein, 15 aa, Juglans regia
QCQQRCERQYKEQQG

SEQ ID NO: 1933 - protein, 15 aa, Juglans regia
ESTGRFQKVTARLAR

SEQ ID NO: 1934 - protein, 15 aa, Juglans regia
RGREEEQQRHNPYYF

SEQ ID NO: 1935 - protein, 15 aa, Juglans regia
GRFQKVTARLARGDI

SEQ ID NO: 1936 - protein, 15 aa, Juglans regia
LQEMDVLVNYAEIKR

SEQ ID NO: 1937 - protein, 15 aa, Juglans regia
ENYRVVILDANPNTS

SEQ ID NO: 1938 - protein, 15 aa, Juglans regia
VPTERQSRRGQGRDH

SEQ ID NO: 1939 - protein, 15 aa, Juglans regia
PYYFHSQSIRSRHES

SEQ ID NO: 1940 - protein, 15 aa, Juglans regia
RHNPYYFHSQSIRSR

SEQ ID NO: 1941 - protein, 15 aa, Juglans regia
PEQRYEQCQQQCERQ

SEQ ID NO: 1942 - protein, 15 aa, Juglans regia
RDFLAGQNNIINQLE

SEQ ID NO: 1943 - protein, 15 aa, Juglans regia
STGRFQKVTARLARG

SEQ ID NO: 1944 - protein, 15 aa, Juglans regia
RFTERTELLRGIENY

SEQ ID NO: 1945 - protein, 15 aa, Juglans regia
QPVNNPGQFREYYAA

SEQ ID NO: 1946 - protein, 15 aa, Juglans regia
FVIPAGHPIAITASQ

SEQ ID NO: 1947 - protein, 15 aa, Juglans regia
NYRVVILDANPNTSM

SEQ ID NO: 1948 - protein, 15 aa, Juglans regia
CQQRCERQYKEQQGR

SEQ ID NO: 1949 - protein, 15 aa, Juglans regia
MVKLLQPVNNPGQFR

SEQ ID NO: 1950 - protein, 15 aa, Juglans regia
HNPYYFHSQSIRSRH

SEQ ID NO: 1951 - protein, 15 aa, Juglans regia
TERQSRRGQGRDHPL

SEQ ID NO: 1952 - protein, 15 aa, Juglans regia
YFHSQSIRSRHESEE

SEQ ID NO: 1953 - protein, 15 aa, Juglans regia
NQRDFLAGQNNIINQ

SEQ ID NO: 1954 - protein, 15 aa, Juglans regia
AVVTRGRATLTLVSQ

SEQ ID NO: 1955 - protein, 15 aa, Juglans regia
PHHKDAESVAVVTRG

SEQ ID NO: 1956 - protein, 15 aa, Juglans regia
RYEMACPHVSSQSYE

SEQ ID NO: 1957 - protein, 15 aa, Juglans regia
ESRGREEEQQRHNPY

SEQ ID NO: 1958 - protein, 15 aa, Juglans regia
VPHYNSKATVVVYVV

SEQ ID NO: 1959 - protein, 15 aa, Juglans regia
KDAESVAVVTRGRAT

SEQ ID NO: 1960 - protein, 15 aa, Juglans regia
ALNTPRDRLERFFDQ

SEQ ID NO: 1961 - protein, 15 aa, Juglans regia
VTARLARGDIFVIPA

SEQ ID NO: 1962 - protein, 15 aa, Juglans regia
ARLARGDIFVIPAGH

SEQ ID NO: 1963 - protein, 15 aa, Juglans regia
IKRGAMMVPHYNSKA

SEQ ID NO: 1964 - protein, 15 aa, Juglans regia
VNYAEIKRGAMMVPH

SEQ ID NO: 1965 - protein, 15 aa, Juglans regia
VYVVEGTGRYEMACP

SEQ ID NO: 1966 - protein, 15 aa, Juglans regia
MVPHYNSKATVVVYV

SEQ ID NO: 1967 - protein, 15 aa, Juglans regia
TLVSQETRESFNLEC

SEQ ID NO: 1968 - protein, 15 aa, Juglans regia
VTRGRATLTLVSQET

SEQ ID NO: 1969 - protein, 15 aa, Juglans regia
TRESFNLECGDVIRV

SEQ ID NO: 1970 - protein, 15 aa, Juglans regia
ESQMESYFVPTERQS

SEQ ID NO: 1971 - protein, 15 aa, Juglans regia
SPSYSNQFGQFFEAC

SEQ ID NO: 1972 - protein, 15 aa, Juglans regia
DQSYLRVFSNDILVA

SEQ ID NO: 1973 - protein, 15 aa, Juglans regia
TGRFQKVTARLARGD

SEQ ID NO: 1974 - protein, 15 aa, Juglans regia
QSPERQRQCQQRCER

SEQ ID NO: 1975 - protein, 15 aa, Juglans regia
DAESVAVVTRGRATL

SEQ ID NO: 1976 - protein, 15 aa, Juglans regia
RGRATLTLVSQETRE

SEQ ID NO: 1977 - protein, 15 aa, Juglans regia
DPEQRYEQCQQQCER

SEQ ID NO: 1978 - protein, 15 aa, Juglans regia
DILVAALNTPRDRLE

SEQ ID NO: 1979 - protein, 15 aa, Juglans regia
ESYFVPTERQSRRGQ

SEQ ID NO: 1980 - protein, 15 aa, Juglans regia
NDILVAALNTPRDRL

SEQ ID NO: 1981 - protein, 15 aa, Juglans regia
LVNYAEIKRGAMMVP

SEQ ID NO: 1982 - protein, 15 aa, Juglans regia
ERQRQCQQRCERQYK

SEQ ID NO: 1983 - protein, 15 aa, Juglans regia
EIEEIFESQMESYFV

SEQ ID NO: 1984 - protein, 15 aa, Juglans regia
SNDILVAALNTPRDR

SEQ ID NO: 1985 - protein, 15 aa, Juglans regia
IINQLEREAKELSFN

SEQ ID NO: 1986 - protein, 15 aa, Juglans regia
INQLEREAKELSFNM

SEQ ID NO: 1987 - protein, 15 aa, Juglans regia
GRRSSGGPISLKSES

SEQ ID NO: 1988 - protein, 15 aa, Juglans regia
NPYYFHSQSIRSRHE

SEQ ID NO: 1989 - protein, 15 aa, Juglans regia
SSQSYEGQGRREQEE

SEQ ID NO: 1990 - protein, 15 aa, Juglans regia
MMVPHYNSKATVVVY

SEQ ID NO: 1991 - protein, 15 aa, Juglans regia
PRDRLERFFDQQEQR

SEQ ID NO: 1992 - protein, 15 aa, Juglans regia
VFSNDILVAALNTPR

SEQ ID NO: 1993 - protein, 15 aa, Juglans regia
IFVIPAGHPIAITAS

SEQ ID NO: 1994 - protein, 15 aa, Juglans regia
RYEQCQQQCERQRRG

SEQ ID NO: 1995 - protein, 15 aa, Juglans regia
SVAVVTRGRATLTLV

SEQ ID NO: 1996 - protein, 15 aa, Juglans regia
IEEIFESQMESYFVP

SEQ ID NO: 1997 - protein, 15 aa, Juglans regia
YEMACPHVSSQSYEG

SEQ ID NO: 1998 - protein, 15 aa, Juglans regia
PHYNSKATVVVYVVE

SEQ ID NO: 1999 - protein, 15 aa, Juglans regia
EMDVLVNYAEIKRGA

SEQ ID NO: 2000 - protein, 15 aa, Juglans regia
QEMDVLVNYAEIKRG

SEQ ID NO: 2001 - protein, 15 aa, Juglans regia
AGHPIAITASQNENL

SEQ ID NO: 2002 - protein, 15 aa, Juglans regia
LTLVSQETRESFNLE

SEQ ID NO: 2003 - protein, 15 aa, Juglans regia
GRYEMACPHVSSQSY

SEQ ID NO: 2004 - protein, 15 aa, Juglans regia
VEGTGRYEMACPHVS

SEQ ID NO: 2005 - protein, 15 aa, Juglans regia
RDRLERFFDQQEQRE

SEQ ID NO: 2006 - protein, 15 aa, Juglans regia
TLTLVSQETRESFNL

SEQ ID NO: 2007 - protein, 15 aa, Juglans regia
TGRYEMACPHVSSQS

SEQ ID NO: 2008 - protein, 15 aa, Juglans regia
SRGREEEQQRHNPYY

SEQ ID NO: 2009 - protein, 15 aa, Juglans regia
VKLLQPVNNPGQFRE

SEQ ID NO: 2010 - protein, 15 aa, Juglans regia
RQRQCQQRCERQYKE

SEQ ID NO: 2011 - protein, 15 aa, Juglans regia
PDQSYLRVFSNDILV

SEQ ID NO: 2012 - protein, 15 aa, Juglans regia
RVFSNDILVAALNTP

SEQ ID NO: 2013 - protein, 15 aa, Juglans regia
KELSFNMPREEIEEI

SEQ ID NO: 2014 - protein, 15 aa, Juglans regia
GAMMVPHYNSKATVV

SEQ ID NO: 2015 - protein, 15 aa, Juglans regia
RFQKVTARLARGDIF

SEQ ID NO: 2016 - protein, 15 aa, Juglans regia
SFNMPREEIEEIFES

SEQ ID NO: 2017 - protein, 15 aa, Juglans regia
YSNQFGQFFEACPEE

SEQ ID NO: 2018 - protein, 15 aa, Juglans regia
YLRVFSNDILVAALN

SEQ ID NO: 2019 - protein, 15 aa, Juglans regia
GCPETFEESQRQSQQ

SEQ ID NO: 2020 - protein, 15 aa, Juglans regia
FNRQESTLVRSRPSR

SEQ ID NO: 2021 - protein, 15 aa, Juglans regia
NRQESTLVRSRPSRS

SEQ ID NO: 2022 - protein, 15 aa, Juglans regia
SREEQEREERKERER

SEQ ID NO: 2023 - protein, 15 aa, Juglans regia
LVYIARGRGITGVLF

SEQ ID NO: 2024 - protein, 15 aa, Juglans regia
REEQEREERKERERE

SEQ ID NO: 2025 - protein, 15 aa, Juglans regia
ETFEESQRQSQQGQS

SEQ ID NO: 2026 - protein, 15 aa, Juglans regia
EHGQQQRGLGNNVFS

SEQ ID NO: 2027 - protein, 15 aa, Juglans regia
APQLVYIARGRGITG

SEQ ID NO: 2028 - protein, 15 aa, Juglans regia
HWSYNDGSNPVVAIS

SEQ ID NO: 2029 - protein, 15 aa, Juglans regia
WSYNDGSNPVVAISL

SEQ ID NO: 2030 - protein, 15 aa, Juglans regia
QLVYIARGRGITGVL

SEQ ID NO: 2031 - protein, 15 aa, Juglans regia
SNAPQLVYIARGRGI

SEQ ID NO: 2032 - protein, 15 aa, Juglans regia
CPETFEESQRQSQQG

SEQ ID NO: 2033 - protein, 15 aa, Juglans regia
TFEESQRQSQQGQSR

SEQ ID NO: 2034 - protein, 15 aa, Juglans regia
ILLSIYLFLIVALFN

SEQ ID NO: 2035 - protein, 15 aa, Juglans regia
PQLVYIARGRGITGV

SEQ ID NO: 2036 - protein, 15 aa, Juglans regia
NAPQLVYIARGRGIT

SEQ ID NO: 2037 - protein, 15 aa, Juglans regia
QQFGQCQLNRLDALE

SEQ ID NO: 2038 - protein, 15 aa, Lens culinaris
PVAINASSDLNLIGF

SEQ ID NO: 2039 - protein, 15 aa, Lens culinaris
RARLSPGDVLVIPAG

SEQ ID NO: 2040 - protein, 15 aa, Lens culinaris
PQLQDLDIFVNSVEI

SEQ ID NO: 2041 - protein, 15 aa, Lens culinaris
VKELAFPGSSREVDR

SEQ ID NO: 2042 - protein, 15 aa, Lens culinaris
VAINASSDLNLIGFG

SEQ ID NO: 2043 - protein, 15 aa, Lens culinaris
LVIPAGHPVAINASS

SEQ ID NO: 2044 - protein, 15 aa, Lens culinaris
FLSGFSKNILEAAFN

SEQ ID NO: 2045 - protein, 15 aa, Lens culinaris
FIFKSNRFQTIYENE

SEQ ID NO: 2046 - protein, 15 aa, Lens culinaris
ENPFIFKSNRFQTIY

SEQ ID NO: 2047 - protein, 15 aa, Lens culinaris
VNSVEIKEGSLLLPN

SEQ ID NO: 2048 - protein, 15 aa, Lens culinaris
QPSFLSGFSKNILEA

SEQ ID NO: 2049 - protein, 15 aa, Lens culinaris
IPAGHPVAINASSDL

SEQ ID NO: 2050 - protein, 15 aa, Lens culinaris
RLSPGDVLVIPAGHP

SEQ ID NO: 2051 - protein, 15 aa, Lens culinaris
IQRPVKELAFPGSSR

SEQ ID NO: 2052 - protein, 15 aa, Lens culinaris
LAFPGSSREVDRLLT

SEQ ID NO: 2053 - protein, 15 aa, Lens culinaris
PVKELAFPGSSREVD

SEQ ID NO: 2054 - protein, 15 aa, Lens culinaris
EEDNVISQIQRPVKE

SEQ ID NO: 2055 - protein, 15 aa, Lens culinaris
FPGSSREVDRLLTNQ

SEQ ID NO: 2056 - protein, 15 aa, Lens culinaris
NLIGFGINAKNNQRN

SEQ ID NO: 2057 - protein, 15 aa, Lens culinaris
INASSDLNLIGFGIN

SEQ ID NO: 2058 - protein, 15 aa, Lens culinaris
EQIEELSKNAKSSSK

SEQ ID NO: 2059 - protein, 15 aa, Lens culinaris
LSPGDVLVIPAGHPV

SEQ ID NO: 2060 - protein, 15 aa, Lens culinaris
QRPVKELAFPGSSRE

SEQ ID NO: 2061 - protein, 15 aa, Lens culinaris
GEEDNVISQIQRPVK

SEQ ID NO: 2062 - protein, 15 aa, Lens culinaris
IFKSNRFQTIYENEN

SEQ ID NO: 2063 - protein, 15 aa, Lens culinaris
VLVIPAGHPVAINAS

SEQ ID NO: 2064 - protein, 15 aa, Lens culinaris
HPVAINASSDLNLIG

SEQ ID NO: 2065 - protein, 15 aa, Lens culinaris
YRARLSPGDVLVIPA

SEQ ID NO: 2066 - protein, 15 aa, Lens culinaris
TKQVQRYRARLSPGD

SEQ ID NO: 2067 - protein, 15 aa, Lens culinaris
NQPSFLSGFSKNILE

SEQ ID NO: 2068 - protein, 15 aa, Lens culinaris
QVQRYRARLSPGDVL

SEQ ID NO: 2069 - protein, 15 aa, Lens culinaris
DNVISQIQRPVKELA

SEQ ID NO: 2070 - protein, 15 aa, Lens culinaris
NASSDLNLIGFGINA

SEQ ID NO: 2071 - protein, 15 aa, Lens culinaris
KNILEAAFNTEYEEI

SEQ ID NO: 2072 - protein, 15 aa, Lens culinaris
VQRYRARLSPGDVLV

SEQ ID NO: 2073 - protein, 15 aa, Lens culinaris
NSVEIKEGSLLLPNY

SEQ ID NO: 2074 - protein, 15 aa, Lupinus albus
NLEYGDALRIPAGST

SEQ ID NO: 2075 - protein, 15 aa, Lupinus albus
PGSAEDIERLIKNQQ

SEQ ID NO: 2076 - protein, 15 aa, Lupinus albus
FVIPAGYPISVNASS

SEQ ID NO: 2077 - protein, 15 aa, Lupinus albus
NYRIVEFQSKPNTLI

SEQ ID NO: 2078 - protein, 15 aa, Lupinus albus
VIVRVSREQIQELTK

SEQ ID NO: 2079 - protein, 15 aa, Lupinus albus
LRLLGFGINAYENQR

SEQ ID NO: 2080 - protein, 15 aa, Lupinus albus
PEEVRRYSARLSEGD

SEQ ID NO: 2081 - protein, 15 aa, Lupinus albus
PHYNSKAIFIVVVGE

SEQ ID NO: 2082 - protein, 15 aa, Lupinus albus
QSYFSGFSRNTLEAT

SEQ ID NO: 2083 - protein, 15 aa, Lupinus albus
NLRSNEPIYSNKYGN

SEQ ID NO: 2084 - protein, 15 aa, Lupinus albus
PAGYPISVNASSNLR

SEQ ID NO: 2085 - protein, 15 aa, Lupinus albus
DNVIRQLDREVKELT

SEQ ID NO: 2086 - protein, 15 aa, Lupinus albus
RNPQVQDLDISLTFT

SEQ ID NO: 2087 - protein, 15 aa, Lupinus albus
FQSKPNTLILPKHSD

SEQ ID NO: 2088 - protein, 15 aa, Lupinus albus
QQSYFSGFSRNTLEA

SEQ ID NO: 2089 - protein, 15 aa, Lupinus albus
LLGFGINAYENQRNF

SEQ ID NO: 2090 - protein, 15 aa, Lupinus albus
SVNASSNLRLLGFGI

SEQ ID NO: 2091 - protein, 15 aa, Lupinus albus
VIPAGYPISVNASSN

SEQ ID NO: 2092 - protein, 15 aa, Lupinus albus
PDDNQKLRVVKLAIP

SEQ ID NO: 2093 - protein, 15 aa, Lupinus albus
TNRLENLQNYRIVEF

SEQ ID NO: 2094 - protein, 15 aa, Lupinus albus
TIVNPDRRQAYNLEY

SEQ ID NO: 2095 - protein, 15 aa, Lupinus albus
SQSGPFNLRSNEPIY

SEQ ID NO: 2096 - protein, 15 aa, Lupinus albus
EDNVIRQLDREVKEL

SEQ ID NO: 2097 - protein, 15 aa, Lupinus albus
ISVNASSNLRLLGFG

SEQ ID NO: 2098 - protein, 15 aa, Lupinus albus
ITIVNPDRRQAYNLE

SEQ ID NO: 2099 - protein, 15 aa, Lupinus albus
IPAGYPISVNASSNL

SEQ ID NO: 2100 - protein, 15 aa, Lupinus albus
AYENQRNFLAGSEDN

SEQ ID NO: 2101 - protein, 15 aa, Lupinus albus
LLLPHYNSKAIFIVV

SEQ ID NO: 2102 - protein, 15 aa, Lupinus albus
NASSNLRLLGFGINA

SEQ ID NO: 2103 - protein, 15 aa, Lupinus albus
ALRIPAGSTSYILNP

SEQ ID NO: 2104 - protein, 15 aa, Lupinus albus
SEDNVIRQLDREVKE

SEQ ID NO: 2105 - protein, 15 aa, Lupinus albus
VKELTFPGSAEDIER

SEQ ID NO: 2106 - protein, 15 aa, Lupinus albus
RYSARLSEGDIFVIP

SEQ ID NO: 2107 - protein, 15 aa, Lupinus albus
FSGFSRNTLEATFNT

SEQ ID NO: 2108 - protein, 15 aa, Lupinus albus
TKDQQSYFSGFSRNT

SEQ ID NO: 2109 - protein, 15 aa, Lupinus albus
NRNGKIRVLERFDQR

SEQ ID NO: 2110 - protein, 15 aa, Lupinus albus
YKNRNGKIRVLERFD

SEQ ID NO: 2111 - protein, 15 aa, Lupinus albus
LEYGDALRIPAGSTS

SEQ ID NO: 2112 - protein, 15 aa, Lupinus albus
GKIRVLERFDQRTNR

SEQ ID NO: 2113 - protein, 15 aa, Lupinus albus
VIRQLDREVKELTFP

SEQ ID NO: 2114 - protein, 15 aa, Lupinus albus
YSNKYGNFYEITPDR

SEQ ID NO: 2115 - protein, 15 aa, Lupinus albus
VNASSNLRLLGFGIN

SEQ ID NO: 2116 - protein, 15 aa, Lupinus albus
RIVEFQSKPNTLILP

SEQ ID NO: 2117 - protein, 15 aa, Lupinus albus
RRYSARLSEGDIFVI

SEQ ID NO: 2118 - protein, 15 aa, Lupinus albus
LRSNEPIYSNKYGNF

SEQ ID NO: 2119 - protein, 15 aa, Lupinus albus
PISVNASSNLRLLGF

SEQ ID NO: 2120 - protein, 15 aa, Lupinus albus
NGKIRVLERFDQRTN

SEQ ID NO: 2121 - protein, 15 aa, Lupinus albus
IRVLERFDQRTNRLE

SEQ ID NO: 2122 - protein, 15 aa, Lupinus albus
SHQDEGVIVRVSREQ

SEQ ID NO: 2123 - protein, 15 aa, Lupinus albus
DKPSQSGPFNLRSNE

SEQ ID NO: 2124 - protein, 15 aa, Lupinus albus
YNLEYGDALRIPAGS

SEQ ID NO: 2125 - protein, 15 aa, Lupinus albus
VLERFDQRTNRLENL

SEQ ID NO: 2126 - protein, 15 aa, Lupinus albus
EFQSKPNTLILPKHS

SEQ ID NO: 2127 - protein, 15 aa, Lupinus albus
GFGINAYENQRNFLA

SEQ ID NO: 2128 - protein, 15 aa, Lupinus albus
KHSDADYVLVVLNGR

SEQ ID NO: 2129 - protein, 15 aa, Lupinus albus
YRIVEFQSKPNTLIL

SEQ ID NO: 2130 - protein, 15 aa, Lupinus albus
YILNPDDNQKLRVVK

SEQ ID NO: 2131 - protein, 15 aa, Lupinus albus
NTLEATFNTRYEEIQ

SEQ ID NO: 2132 - protein, 15 aa, Lupinus albus
PKHSDADYVLVVLNG

SEQ ID NO: 2133 - protein, 15 aa, Lupinus albus
KELTFPGSAEDIERL

SEQ ID NO: 2134 - protein, 15 aa, Lupinus albus
VEFQSKPNTLILPKH

SEQ ID NO: 2135 - protein, 15 aa, Lupinus albus
AGYPISVNASSNLRL

SEQ ID NO: 2136 - protein, 15 aa, Lupinus albus
RNTLEATFNTRYEEI

SEQ ID NO: 2137 - protein, 15 aa, Lupinus albus
HYNSKAIFIVVVGEG

SEQ ID NO: 2138 - protein, 15 aa, Lupinus albus
NTLILPKHSDADYVL

SEQ ID NO: 2139 - protein, 15 aa, Lupinus albus
SKPNTLILPKHSDAD

SEQ ID NO: 2140 - protein, 15 aa, Lupinus albus
LPHYNSKAIFIVVVG

SEQ ID NO: 2141 - protein, 15 aa, Lupinus albus
KNRNGKIRVLERFDQ

SEQ ID NO: 2142 - protein, 15 aa, Lupinus albus
DALRIPAGSTSYILN

SEQ ID NO: 2143 - protein, 15 aa, Lupinus albus
NFYEITPDRNPQVQD

SEQ ID NO: 2144 - protein, 15 aa, Lupinus albus
SSTKDQQSYFSGFSR

SEQ ID NO: 2145 - protein, 15 aa, Lupinus albus
AGSEDNVIRQLDREV

SEQ ID NO: 2146 - protein, 15 aa, Lupinus albus
GSTSYILNPDDNQKL

SEQ ID NO: 2147 - protein, 15 aa, Lupinus albus
RIPAGSTSYILNPDD

SEQ ID NO: 2148 - protein, 15 aa, Lupinus albus
NSKAIFIVVVGEGNG

SEQ ID NO: 2149 - protein, 15 aa, Lupinus albus
LDREVKELTFPGSAE

SEQ ID NO: 2150 - protein, 15 aa, Lupinus albus
IVEFQSKPNTLILPK

SEQ ID NO: 2151 - protein, 15 aa, Lupinus albus
NLQNYRIVEFQSKPN

SEQ ID NO: 2152 - protein, 15 aa, Lupinus albus
RLLGFGINAYENQRN

SEQ ID NO: 2153 - protein, 15 aa, Lupinus albus
LRIPAGSTSYILNPD

SEQ ID NO: 2154 - protein, 15 aa, Lupinus albus
GDIFVIPAGYPISVN

SEQ ID NO: 2155 - protein, 15 aa, Lupinus albus
YSARLSEGDIFVIPA

SEQ ID NO: 2156 - protein, 15 aa, Lupinus albus
LENLQNYRIVEFQSK

SEQ ID NO: 2157 - protein, 15 aa, Lupinus albus
YGDALRIPAGSTSYI

SEQ ID NO: 2158 - protein, 15 aa, Lupinus albus
LGFGINAYENQRNFL

SEQ ID NO: 2159 - protein, 15 aa, Lupinus albus
FSRNTLEATFNTRYE

SEQ ID NO: 2160 - protein, 15 aa, Lupinus albus
ELTFPGSAEDIERLI

SEQ ID NO: 2161 - protein, 15 aa, Lupinus albus
LAIPINNPGYFYDFY

SEQ ID NO: 2162 - protein, 15 aa, Lupinus albus
NLRLLGFGINAYENQ

SEQ ID NO: 2163 - protein, 15 aa, Lupinus angustifolius
FVIPAGYPISVNASS

SEQ ID NO: 2164 - protein, 15 aa, Lupinus angustifolius
KELTFPGSAQDVERL

SEQ ID NO: 2165 - protein, 15 aa, Lupinus angustifolius
VISQLDREVKELTFP

SEQ ID NO: 2166 - protein, 15 aa, Lupinus angustifolius
YGDALRLPAGTTSYI

SEQ ID NO: 2167 - protein, 15 aa, Lupinus angustifolius
EDNVISQLDREVKEL

SEQ ID NO: 2168 - protein, 15 aa, Lupinus angustifolius
ELTFPGSAQDVERLI

SEQ ID NO: 2169 - protein, 15 aa, Lupinus angustifolius
RIVEFQSNPNTLILP

SEQ ID NO: 2170 - protein, 15 aa, Lupinus angustifolius
PAGYPISVNASSNLR

SEQ ID NO: 2171 - protein, 15 aa, Lupinus angustifolius
DALRLPAGTTSYILN

SEQ ID NO: 2172 - protein, 15 aa, Lupinus angustifolius
RNPQVQDLDISLTFT

SEQ ID NO: 2173 - protein, 15 aa, Lupinus angustifolius
LAIPINNPSNFYDFY

SEQ ID NO: 2174 - protein, 15 aa, Lupinus angustifolius
RNRNGQIRVLERFDQ

SEQ ID NO: 2175 - protein, 15 aa, Lupinus angustifolius
GQIRVLERFDQRTNR

SEQ ID NO: 2176 - protein, 15 aa, Lupinus angustifolius
SVNASSNLRLLGFGI

SEQ ID NO: 2177 - protein, 15 aa, Lupinus angustifolius
NSKAIFIVVVDEGEG

SEQ ID NO: 2178 - protein, 15 aa, Lupinus angustifolius
LENLQNYRIVEFQSN

SEQ ID NO: 2179 - protein, 15 aa, Lupinus angustifolius
VIPAGYPISVNASSN

SEQ ID NO: 2180 - protein, 15 aa, Lupinus angustifolius
TNRLENLQNYRIVEF

SEQ ID NO: 2181 - protein, 15 aa, Lupinus angustifolius
ISVNASSNLRLLGFG

SEQ ID NO: 2182 - protein, 15 aa, Lupinus angustifolius
YNLEYGDALRLPAGT

SEQ ID NO: 2183 - protein, 15 aa, Lupinus angustifolius
GTTSYILNPDDNQNL

SEQ ID NO: 2184 - protein, 15 aa, Lupinus angustifolius
GFGINANENQRNFLA

SEQ ID NO: 2185 - protein, 15 aa, Lupinus angustifolius
IPAGYPISVNASSNL

SEQ ID NO: 2186 - protein, 15 aa, Lupinus angustifolius
SSTKDQQSYFSGFSK

SEQ ID NO: 2187 - protein, 15 aa, Lupinus angustifolius
VEFQSNPNTLILPKH

SEQ ID NO: 2188 - protein, 15 aa, Lupinus angustifolius
PHYNSKAIFIVVVDE

SEQ ID NO: 2189 - protein, 15 aa, Lupinus angustifolius
VIVRVSKEQIQELRK

SEQ ID NO: 2190 - protein, 15 aa, Lupinus angustifolius
KHSDADYILVVLNGR

SEQ ID NO: 2191 - protein, 15 aa, Lupinus angustifolius
LLLPHYNSKAIFIVV

SEQ ID NO: 2192 - protein, 15 aa, Lupinus angustifolius
YILNPDDNQNLRVVK

SEQ ID NO: 2193 - protein, 15 aa, Lupinus angustifolius
NASSNLRLLGFGINA

SEQ ID NO: 2194 - protein, 15 aa, Lupinus angustifolius
YRIVEFQSNPNTLIL

SEQ ID NO: 2195 - protein, 15 aa, Lupinus angustifolius
ITIVNPDKRQAYNLE

SEQ ID NO: 2196 - protein, 15 aa, Lupinus angustifolius
RYSARLSEGDIFVIP

SEQ ID NO: 2197 - protein, 15 aa, Lupinus angustifolius
NLQNYRIVEFQSNPN

SEQ ID NO: 2198 - protein, 15 aa, Lupinus angustifolius
NRNGQIRVLERFDQR

SEQ ID NO: 2199 - protein, 15 aa, Lupinus angustifolius
QSYFSGFSKNTLEAT

SEQ ID NO: 2200 - protein, 15 aa, Lupinus angustifolius
NLRLLGFGINANENQ

SEQ ID NO: 2201 - protein, 15 aa, Lupinus angustifolius
DNVISQLDREVKELT

SEQ ID NO: 2202 - protein, 15 aa, Lupinus angustifolius
TKDQQSYFSGFSKNT

SEQ ID NO: 2203 - protein, 15 aa, Lupinus angustifolius
PKHSDADYILVVLNG

SEQ ID NO: 2204 - protein, 15 aa, Lupinus angustifolius
VNASSNLRLLGFGIN

SEQ ID NO: 2205 - protein, 15 aa, Lupinus angustifolius
NFYEITPERNPQVQD

SEQ ID NO: 2206 - protein, 15 aa, Lupinus angustifolius
IVEFQSNPNTLILPK

SEQ ID NO: 2207 - protein, 15 aa, Lupinus angustifolius
HYNSKAIFIVVVDEG

SEQ ID NO: 2208 - protein, 15 aa, Lupinus angustifolius
AGSEDNVISQLDREV

SEQ ID NO: 2209 - protein, 15 aa, Lupinus angustifolius
PISVNASSNLRLLGF

SEQ ID NO: 2210 - protein, 15 aa, Lupinus angustifolius
FSGFSKNTLEATFNT

SEQ ID NO: 2211 - protein, 15 aa, Lupinus angustifolius
SYQDEGVIVRVSKEQ

SEQ ID NO: 2212 - protein, 15 aa, Lupinus angustifolius
RLPAGTTSYILNPDD

SEQ ID NO: 2213 - protein, 15 aa, Lupinus angustifolius
VKELTFPGSAQDVER

SEQ ID NO: 2214 - protein, 15 aa, Lupinus angustifolius
IRVLERFDQRTNRLE

SEQ ID NO: 2215 - protein, 15 aa, Lupinus angustifolius
LRSNESIYSNKFGNF

SEQ ID NO: 2216 - protein, 15 aa, Lupinus angustifolius
GKPSESGPFNLRSNE

SEQ ID NO: 2217 - protein, 15 aa, Lupinus angustifolius
ANENQRNFLAGSEDN

SEQ ID NO: 2218 - protein, 15 aa, Lupinus angustifolius
VLERFDQRTNRLENL

SEQ ID NO: 2219 - protein, 15 aa, Lupinus angustifolius
NLEYGDALRLPAGTT

SEQ ID NO: 2220 - protein, 15 aa, Lupinus angustifolius
LRLLGFGINANENQR

SEQ ID NO: 2221 - protein, 15 aa, Lupinus angustifolius
NTLEATFNTRYEEIQ

SEQ ID NO: 2222 - protein, 15 aa, Lupinus angustifolius
RLLGFGINANENQRN

SEQ ID NO: 2223 - protein, 15 aa, Lupinus angustifolius
NLRSNESIYSNKFGN

SEQ ID NO: 2224 - protein, 15 aa, Lupinus angustifolius
QLDREVKELTFPGSA

SEQ ID NO: 2225 - protein, 15 aa, Lupinus angustifolius
SEDNVISQLDREVKE

SEQ ID NO: 2226 - protein, 15 aa, Lupinus angustifolius
PDDNQNLRVVKLAIP

SEQ ID NO: 2227 - protein, 15 aa, Lupinus angustifolius
AGYPISVNASSNLRL

SEQ ID NO: 2228 - protein, 15 aa, Lupinus angustifolius
LLGFGINANENQRNF

SEQ ID NO: 2229 - protein, 15 aa, Lupinus angustifolius
LEYGDALRLPAGTTS

SEQ ID NO: 2230 - protein, 15 aa, Lupinus angustifolius
NYRIVEFQSNPNTLI

SEQ ID NO: 2231 - protein, 15 aa, Lupinus angustifolius
NTLILPKHSDADYIL

SEQ ID NO: 2232 - protein, 15 aa, Lupinus angustifolius
TIVNPDKRQAYNLEY

SEQ ID NO: 2233 - protein, 15 aa, Lupinus angustifolius
NGQIRVLERFDQRTN

SEQ ID NO: 2234 - protein, 15 aa, Lupinus angustifolius
KGKPSESGPFNLRSN

SEQ ID NO: 2235 - protein, 15 aa, Lupinus angustifolius
PGSAQDVERLIKNQQ

SEQ ID NO: 2236 - protein, 15 aa, Lupinus angustifolius
SNPNTLILPKHSDAD

SEQ ID NO: 2237 - protein, 15 aa, Lupinus angustifolius
SESGPFNLRSNESIY

SEQ ID NO: 2238 - protein, 15 aa, Lupinus angustifolius
LRLPAGTTSYILNPD

SEQ ID NO: 2239 - protein, 15 aa, Lupinus angustifolius
LGFGINANENQRNFL

SEQ ID NO: 2240 - protein, 15 aa, Lupinus angustifolius
GDIFVIPAGYPISVN

SEQ ID NO: 2241 - protein, 15 aa, Lupinus angustifolius
EFQSNPNTLILPKHS

SEQ ID NO: 2242 - protein, 15 aa, Lupinus angustifolius
YSARLSEGDIFVIPA

SEQ ID NO: 2243 - protein, 15 aa, Lupinus angustifolius
LPHYNSKAIFIVVVD

SEQ ID NO: 2244 - protein, 15 aa, Lupinus angustifolius
ALRLPAGTTSYILNP

SEQ ID NO: 2245 - protein, 15 aa, Lupinus angustifolius
QQSYFSGFSKNTLEA

SEQ ID NO: 2246 - protein, 15 aa, Lupinus angustifolius
FQSNPNTLILPKHSD

SEQ ID NO: 2247 - protein, 15 aa, Lupinus angustifolius
KNTLEATFNTRYEEI

SEQ ID NO: 2248 - protein, 15 aa, Pinus koraiensis
EGRIEMACPHLGQEH

SEQ ID NO: 2249 - protein, 15 aa, Pisum sativum
PVAINASSDLNLIGF

SEQ ID NO: 2250 - protein, 15 aa, Pisum sativum
SGPFNLRSRNPIYSN

SEQ ID NO: 2251 - protein, 15 aa, Pisum sativum
VAINASSDLNLIGFG

SEQ ID NO: 2252 - protein, 15 aa, Pisum sativum
NLIGFGINAENNERN

SEQ ID NO: 2253 - protein, 15 aa, Pisum sativum
ENPFIFKSNRFQTLY

SEQ ID NO: 2254 - protein, 15 aa, Pisum sativum
FIFKSNRFQTLYENE

SEQ ID NO: 2255 - protein, 15 aa, Pisum sativum
DNVISQVERPVKELA

SEQ ID NO: 2256 - protein, 15 aa, Pisum sativum
QQLQDLDIFVNSVDI

SEQ ID NO: 2257 - protein, 15 aa, Pisum sativum
VERPVKELAFPGSSH

SEQ ID NO: 2258 - protein, 15 aa, Pisum sativum
GEEDNVISQVERPVK

SEQ ID NO: 2259 - protein, 15 aa, Pisum sativum
NQPSLLSGFSKNILE

SEQ ID NO: 2260 - protein, 15 aa, Pisum sativum
QVQLYRAKLSPGDVF

SEQ ID NO: 2261 - protein, 15 aa, Pisum sativum
KNILEAAFNTNYEEI

SEQ ID NO: 2262 - protein, 15 aa, Pisum sativum
LAFPGSSHEVDRLLK

SEQ ID NO: 2263 - protein, 15 aa, Pisum sativum
EEDNVISQVERPVKE

SEQ ID NO: 2264 - protein, 15 aa, Pisum sativum
ERPVKELAFPGSSHE

SEQ ID NO: 2265 - protein, 15 aa, Pisum sativum
VNSVDIKEGSLLLPN

SEQ ID NO: 2266 - protein, 15 aa, Pisum sativum
FPGSSHEVDRLLKNQ

SEQ ID NO: 2267 - protein, 15 aa, Pisum sativum
NSVDIKEGSLLLPNY

SEQ ID NO: 2268 - protein, 15 aa, Pisum sativum
LSGFSKNILEAAFNT

SEQ ID NO: 2269 - protein, 15 aa, Pisum sativum
INASSDLNLIGFGIN

SEQ ID NO: 2270 - protein, 15 aa, Pisum sativum
IFKSNRFQTLYENEN

SEQ ID NO: 2271 - protein, 15 aa, Pisum sativum
EQIEELSKNAKSSSK

SEQ ID NO: 2272 - protein, 15 aa, Pisum sativum
PVKELAFPGSSHEVD

SEQ ID NO: 2273 - protein, 15 aa, Pisum sativum
VFVIPAGHPVAINAS

SEQ ID NO: 2274 - protein, 15 aa, Pisum sativum
HPVAINASSDLNLIG

SEQ ID NO: 2275 - protein, 15 aa, Pisum sativum
LSPGDVFVIPAGHPV

SEQ ID NO: 2276 - protein, 15 aa, Pisum sativum
QPSLLSGFSKNILEA

SEQ ID NO: 2277 - protein, 15 aa, Pisum sativum
FVIPAGHPVAINASS

SEQ ID NO: 2278 - protein, 15 aa, Pisum sativum
LLSGFSKNILEAAFN

SEQ ID NO: 2279 - protein, 15 aa, Pisum sativum
VKELAFPGSSHEVDR

SEQ ID NO: 2280 - protein, 15 aa, Pisum sativum
RAKLSPGDVFVIPAG

SEQ ID NO: 2281 - protein, 15 aa, Pisum sativum
NASSDLNLIGFGINA

SEQ ID NO: 2282 - protein, 15 aa, Pisum sativum
NNEVQRYEARLSPGD

SEQ ID NO: 2283 - protein, 15 aa, Pisum sativum
LGFGINAENNERNFL

SEQ ID NO: 2284 - protein, 15 aa, Pisum sativum
TDAIVKVSREQIEEL

SEQ ID NO: 2285 - protein, 15 aa, Pisum sativum
LLGFGINAENNERNF

SEQ ID NO: 2286 - protein, 15 aa, Pisum sativum
ARLSPGDVVIIPAGH

SEQ ID NO: 2287 - protein, 15 aa, Pisum sativum
VQRYEARLSPGDVVI

SEQ ID NO: 2288 - protein, 15 aa, Pistacia vera
ILRFLQLSAKKGVLH

SEQ ID NO: 2289 - protein, 15 aa, Pistacia vera
ALPAGVAHWIYNNGQ

SEQ ID NO: 2290 - protein, 15 aa, Pistacia vera
IQEGDVIALPAGVAH

SEQ ID NO: 2291 - protein, 15 aa, Pistacia vera
LPAGVAHWIYNNGQS

SEQ ID NO: 2292 - protein, 15 aa, Pistacia vera
AHSIVYITRGNGRIQ

SEQ ID NO: 2293 - protein, 15 aa, Pistacia vera
WNVNAHSIVYITRGN

SEQ ID NO: 2294 - protein, 15 aa, Pistacia vera
VFHGPGGENPESFYR

SEQ ID NO: 2295 - protein, 15 aa, Pistacia vera
VNITKGGMSGPFYNS

SEQ ID NO: 2296 - protein, 15 aa, Pistacia vera
VVSGEGRLEIACPHL

SEQ ID NO: 2297 - protein, 15 aa, Pistacia vera
EQCAKGCEKYYKEKK

SEQ ID NO: 2298 - protein, 15 aa, Pistacia vera
EVDKVFGKQDEEFFF

SEQ ID NO: 2299 - protein, 15 aa, Pistacia vera
ITKGGMSGPFYNSRA

SEQ ID NO: 2300 - protein, 15 aa, Pistacia vera
SGPFYNSRATKIAIV

SEQ ID NO: 2301 - protein, 15 aa, Pistacia vera
GMSGPFYNSRATKIA

SEQ ID NO: 2302 - protein, 15 aa, Pistacia vera
MSGPFYNSRATKIAI

SEQ ID NO: 2303 - protein, 15 aa, Pistacia vera
YVNITKGGMSGPFYN

SEQ ID NO: 2304 - protein, 15 aa, Pistacia vera
VDKVFGKQDEEFFFQ

SEQ ID NO: 2305 - protein, 15 aa, Pistacia vera
GPFYNSRATKIAIVV

SEQ ID NO: 2306 - protein, 15 aa, Pistacia vera
CKHQCKVQRQYDEEQ

SEQ ID NO: 2307 - protein, 15 aa, Pistacia vera
HYEVFHGPGGENPES

SEQ ID NO: 2308 - protein, 15 aa, Pistacia vera
VNLPGHYEVFHGPGG

SEQ ID NO: 2309 - protein, 15 aa, Pistacia vera
GEGRLEIACPHLSSS

SEQ ID NO: 2310 - protein, 15 aa, Pistacia vera
IRAMSRRGEGPSIWP

SEQ ID NO: 2311 - protein, 15 aa, Pistacia vera
QDEEFFFQGPKWRQH

SEQ ID NO: 2312 - protein, 15 aa, Pistacia vera
AIVVSGEGRLEIACP

SEQ ID NO: 2313 - protein, 15 aa, Pistacia vera
YNSRATKIAIVVSGE

SEQ ID NO: 2314 - protein, 15 aa, Pistacia vera
FYNSRATKIAIVVSG

SEQ ID NO: 2315 - protein, 15 aa, Pistacia vera
DEEFFFQGPKWRQHQ

SEQ ID NO: 2316 - protein, 15 aa, Pistacia vera
AMSRRGEGPSIWPFT

SEQ ID NO: 2317 - protein, 15 aa, Pistacia vera
QCAKGCEKYYKEKKG

SEQ ID NO: 2318 - protein, 15 aa, Pistacia vera
FVVPAGHPFVTVASG

SEQ ID NO: 2319 - protein, 15 aa, Pistacia vera
VFGKQDEEFFFQGPK

SEQ ID NO: 2320 - protein, 15 aa, Pistacia vera
RATKIAIVVSGEGRL

SEQ ID NO: 2321 - protein, 15 aa, Pistacia vera
PYVFEDEHFTTRVKT

SEQ ID NO: 2322 - protein, 15 aa, Pistacia vera
KVFGKQDEEFFFQGP

SEQ ID NO: 2323 - protein, 15 aa, Pistacia vera
VQRQYDEEQKEQCAK

SEQ ID NO: 2324 - protein, 15 aa, Pistacia vera
IVVSGEGRLEIACPH

SEQ ID NO: 2325 - protein, 15 aa, Pistacia vera
KEQCAKGCEKYYKEK

SEQ ID NO: 2326 - protein, 15 aa, Pistacia vera
QIRAMSRRGEGPSIW

SEQ ID NO: 2327 - protein, 15 aa, Pistacia vera
FNLAGNPEDEFQQQQ

SEQ ID NO: 2328 - protein, 15 aa, Pistacia vera
PEEVLANAFQISRED

SEQ ID NO: 2329 - protein, 15 aa, Pistacia vera
ECQIDQLDALEPDNR

SEQ ID NO: 2330 - protein, 15 aa, Pistacia vera
ANAFQISREDARKIK

SEQ ID NO: 2331 - protein, 15 aa, Pistacia vera
AGVANWCYNEGNSPV

SEQ ID NO: 2332 - protein, 15 aa, Pistacia vera
SFKTNDRAMISPLAG

SEQ ID NO: 2333 - protein, 15 aa, Pistacia vera
ETICTMKLKENIHDP

SEQ ID NO: 2334 - protein, 15 aa, Pistacia vera
ITSLNSLNLPILKWL

SEQ ID NO: 2335 - protein, 15 aa, Pistacia vera
MVPHWNFNAHSIVYG

SEQ ID NO: 2336 - protein, 15 aa, Pistacia vera
ILFHGCLASRQQGQQ

SEQ ID NO: 2337 - protein, 15 aa, Pistacia vera
MPEEVLANAFQISRE

SEQ ID NO: 2338 - protein, 15 aa, Pistacia vera
TSLNSLNLPILKWLQ

SEQ ID NO: 2339 - protein, 15 aa, Pistacia vera
FRCAGVAVARHTIQP

SEQ ID NO: 2340 - protein, 15 aa, Pistacia vera
VPHWNFNAHSIVYGC

SEQ ID NO: 2341 - protein, 15 aa, Pistacia vera
IYTPEVGRITSLNSL

SEQ ID NO: 2342 - protein, 15 aa, Pistacia vera
PNHEQFRCAGVAVAR

SEQ ID NO: 2343 - protein, 15 aa, Pistacia vera
HEQFRCAGVAVARHT

SEQ ID NO: 2344 - protein, 15 aa, Pistacia vera
LAGSTSVLRAMPEEV

SEQ ID NO: 2345 - protein, 15 aa, Pistacia vera
LLILFHGCLASRQQG

SEQ ID NO: 2346 - protein, 15 aa, Pistacia vera
LQLSAERGVLQNNAL

SEQ ID NO: 2347 - protein, 15 aa, Pistacia vera
WCYNEGNSPVVTVTL

SEQ ID NO: 2348 - protein, 15 aa, Pistacia vera
LILFHGCLASRQQGQ

SEQ ID NO: 2349 - protein, 15 aa, Pistacia vera
QQQNECQIDQLDALE

SEQ ID NO: 2350 - protein, 15 aa, Pistacia vera
VEYEAGMVETWDPNH

SEQ ID NO: 2351 - protein, 15 aa, Pistacia vera
PLAGSTSVLRAMPEE

SEQ ID NO: 2352 - protein, 15 aa, Pistacia vera
RITSLNSLNLPILKW

SEQ ID NO: 2353 - protein, 15 aa, Pistacia vera
CYNEGNSPVVTVTLL

SEQ ID NO: 2354 - protein, 15 aa, Pistacia vera
KRARGQRFEWISFKT

SEQ ID NO: 2355 - protein, 15 aa, Pistacia vera
RCAGVAVARHTIQPN

SEQ ID NO: 2356 - protein, 15 aa, Pistacia vera
VLRAMPEEVLANAFQ

SEQ ID NO: 2357 - protein, 15 aa, Pistacia vera
SPLAGSTSVLRAMPE

SEQ ID NO: 2358 - protein, 15 aa, Pistacia vera
VGRITSLNSLNLPIL

SEQ ID NO: 2359 - protein, 15 aa, Pistacia vera
RAMISPLAGSTSVLR

SEQ ID NO: 2360 - protein, 15 aa, Pistacia vera
EVGRITSLNSLNLPI

SEQ ID NO: 2361 - protein, 15 aa, Pistacia vera
RGQRFEWISFKTNDR

SEQ ID NO: 2362 - protein, 15 aa, Pistacia vera
KFNLAGNPEDEFQQQ

SEQ ID NO: 2363 - protein, 15 aa, Pistacia vera
AMISPLAGSTSVLRA

SEQ ID NO: 2364 - protein, 15 aa, Pistacia vera
AVVKRARGQRFEWIS

SEQ ID NO: 2365 - protein, 15 aa, Pistacia vera
REDARKIKFNNEQPT

SEQ ID NO: 2366 - protein, 15 aa, Pistacia vera
YTPEVGRITSLNSLN

SEQ ID NO: 2367 - protein, 15 aa, Pistacia vera
SLNSLNLPILKWLQL

SEQ ID NO: 2368 - protein, 15 aa, Pistacia vera
QVQVVDNFGNTVFDG

SEQ ID NO: 2369 - protein, 15 aa, Pistacia vera
VKRARGQRFEWISFK

SEQ ID NO: 2370 - protein, 15 aa, Pistacia vera
MISPLAGSTSVLRAM

SEQ ID NO: 2371 - protein, 15 aa, Pistacia vera
ARGQRFEWISFKTND

SEQ ID NO: 2372 - protein, 15 aa, Pistacia vera
GRITSLNSLNLPILK

SEQ ID NO: 2373 - protein, 15 aa, Pistacia vera
RAMPEEVLANAFQIS

SEQ ID NO: 2374 - protein, 15 aa, Pistacia vera
QVVDNFGNTVFDGEV

SEQ ID NO: 2375 - protein, 15 aa, Pistacia vera
PEVGRITSLNSLNLP

SEQ ID NO: 2376 - protein, 15 aa, Pistacia vera
VQVVDNFGNTVFDGE

SEQ ID NO: 2377 - protein, 15 aa, Pistacia vera
NHEQFRCAGVAVARH

SEQ ID NO: 2378 - protein, 15 aa, Pistacia vera
ISFKTNDRAMISPLA

SEQ ID NO: 2379 - protein, 15 aa, Pistacia vera
EQFRCAGVAVARHTI

SEQ ID NO: 2380 - protein, 15 aa, Pistacia vera
GQRFEWISFKTNDRA

SEQ ID NO: 2381 - protein, 15 aa, Pistacia vera
LEETICTMKLKENIH

SEQ ID NO: 2382 - protein, 15 aa, Pistacia vera
VVDNFGNTVFDGEVS

SEQ ID NO: 2383 - protein, 15 aa, Pistacia vera
CLLILFHGCLASRQQ

SEQ ID NO: 2384 - protein, 15 aa, Pistacia vera
FQISREDARKIKFNN

SEQ ID NO: 2385 - protein, 15 aa, Prunus Dulcis
SREQARQLKYNRQET

SEQ ID NO: 2386 - protein, 15 aa, Prunus Dulcis
PRKFYLAGNPENEFN

SEQ ID NO: 2387 - protein, 15 aa, Prunus Dulcis
INTLAGRTSFLRALP

SEQ ID NO: 2388 - protein, 15 aa, Prunus Dulcis
KFYLAGNPENEFNQQ

SEQ ID NO: 2389 - protein, 15 aa, Prunus Dulcis
SHNLPILRFLRLSAE

SEQ ID NO: 2390 - protein, 15 aa, Prunus Dulcis
YRNGIYSPHWNVNAH

SEQ ID NO: 2391 - protein, 15 aa, Prunus Dulcis
QEQQGSGNNVFSGFN

SEQ ID NO: 2392 - protein, 15 aa, Prunus Dulcis
PDEVLANAYQISREQ

SEQ ID NO: 2393 - protein, 15 aa, Prunus Dulcis
QARQLKYNRQETIAL

SEQ ID NO: 2394 - protein, 15 aa, Prunus Dulcis
EQARQLKYNRQETIA

SEQ ID NO: 2395 - protein, 15 aa, Prunus Dulcis
GFFYRNGIYSPHWNV

SEQ ID NO: 2396 - protein, 15 aa, Prunus Dulcis
RKFYLAGNPENEFNQ

SEQ ID NO: 2397 - protein, 15 aa, Prunus Dulcis
SNAPQLIYIVQGRGV

SEQ ID NO: 2398 - protein, 15 aa, Prunus Dulcis
RQQEQQGSGNNVFSG

SEQ ID NO: 2399 - protein, 15 aa, Prunus Dulcis
DHNQLDQNPRKFYLA

SEQ ID NO: 2400 - protein, 15 aa, Prunus Dulcis
AGRISTLNSHNLPIL

SEQ ID NO: 2401 - protein, 15 aa, Prunus Dulcis
ARQLKYNRQETIALS

SEQ ID NO: 2402 - protein, 15 aa, Prunus Dulcis
NPRKFYLAGNPENEF

SEQ ID NO: 2403 - protein, 15 aa, Prunus Dulcis
QQEQQGSGNNVFSGF

SEQ ID NO: 2404 - protein, 15 aa, Prunus Dulcis
FYLAGNPENEFNQQG

SEQ ID NO: 2405 - protein, 15 aa, Prunus Dulcis
ISREQARQLKYNRQE

SEQ ID NO: 2406 - protein, 15 aa, Sesamum indicum
REAKELAFGMPAREV

SEQ ID NO: 2407 - protein, 15 aa, Sesamum indicum
EADIFSRQAGRVHVV

SEQ ID NO: 2408 - protein, 15 aa, Sesamum indicum
QLDNGLEETFCTMKF

SEQ ID NO: 2409 - protein, 15 aa, Sesamum indicum
LAGYTSVIRAMPLQV

SEQ ID NO: 2410 - protein, 15 aa, Sesamum indicum
SAEKGNLYSNALVSP

SEQ ID NO: 2411 - protein, 15 aa, Sesamum indicum
WNLNAHSIIYITRGS

SEQ ID NO: 2412 - protein, 15 aa, Sesamum indicum
APQLLYVVRGRGIQG

SEQ ID NO: 2413 - protein, 15 aa, Sesamum indicum
RISSLNSLTLPVLSW

SEQ ID NO: 2414 - protein, 15 aa, Sesamum indicum
ISFKTNDNAMTSQLA

SEQ ID NO: 2415 - protein, 15 aa, Sesamum indicum
SSLNSLTLPVLSWLR

SEQ ID NO: 2416 - protein, 15 aa, Sesamum indicum
GANGLEETLCTAKLR

SEQ ID NO: 2417 - protein, 15 aa, Sesamum indicum
AHSIIYITRGSGRFQ

SEQ ID NO: 2418 - protein, 15 aa, Sesamum indicum
VAPHWNLNAHSIIYI

SEQ ID NO: 2419 - protein, 15 aa, Sesamum indicum
ISSLNSLTLPVLSWL

SEQ ID NO: 2420 - protein, 15 aa, Sesamum indicum
SFKTNDNAMTSQLAG

SEQ ID NO: 2421 - protein, 15 aa, Sesamum indicum
DRNNQQFECAGVAAV

SEQ ID NO: 2422 - protein, 15 aa, Vigna radiata
ATSNLNFFAFGINAE

SEQ ID NO: 2423 - protein, 15 aa, Vigna radiata
EAQQSYLQGFSKNIL

SEQ ID NO: 2424 - protein, 15 aa, Vigna radiata
DMKEGSLLLPHYNSK

SEQ ID NO: 2425 - protein, 15 aa, Vigna radiata
FQDFFLSSTEAQQSY

SEQ ID NO: 2426 - protein, 15 aa, Vigna radiata
KPNTLLLPHHADADF

SEQ ID NO: 2427 - protein, 15 aa, Vigna radiata
LLLPHYNSKAIVILV

SEQ ID NO: 2428 - protein, 15 aa, Vigna radiata
FFLSSTEAQQSYLQG

SEQ ID NO: 2429 - protein, 15 aa, Vigna radiata
FLSSTEAQQSYLQGF

SEQ ID NO: 2430 - protein, 15 aa, Vigna radiata
FFAFGINAENNQRNF

SEQ ID NO: 2431 - protein, 15 aa, Vigna radiata
NEGKANIELVGQREQ

SEQ ID NO: 2432 - protein, 15 aa, Vigna radiata
IYSNKLGRWFEITPE

SEQ ID NO: 2433 - protein, 15 aa, Vigna radiata
VLQRFDQRSKQMQNL

SEQ ID NO: 2434 - protein, 15 aa, Vigna radiata
FAFGINAENNQRNFL

SEQ ID NO: 2435 - protein, 15 aa, Vigna radiata
DFFLSSTEAQQSYLQ

SEQ ID NO: 2436 - protein, 15 aa, Vigna radiata
LPHYNSKAIVILVIN

SEQ ID NO: 2437 - protein, 15 aa, Vigna radiata
MSKPNTLLLPHHADA

SEQ ID NO: 2438 - protein, 15 aa, Vigna radiata
SNLNFFAFGINAENN

SEQ ID NO: 2439 - protein, 15 aa, Vigna radiata
QDFFLSSTEAQQSYL

SEQ ID NO: 2440 - protein, 15 aa, Vigna radiata
LNFFAFGINAENNQR

SEQ ID NO: 2441 - protein, 15 aa, Vigna radiata
PHYNSKAIVILVINE

SEQ ID NO: 2442 - protein, 15 aa, Vigna radiata
LRVLQRFDQRSKQMQ

SEQ ID NO: 2443 - protein, 15 aa, Vigna radiata
NFFAFGINAENNQRN

SEQ ID NO: 2444 - protein, 15 aa, Vigna radiata
TEAQQSYLQGFSKNI

SEQ ID NO: 2445 - protein, 15 aa, Vigna radiata
KAIVILVINEGKANI

SEQ ID NO: 2446 - protein, 15 aa, Vigna radiata
TSNLNFFAFGINAEN

SEQ ID NO: 2447 - protein, 15 aa, Vigna radiata
RFQDFFLSSTEAQQS

SEQ ID NO: 2448 - protein, 15 aa, Vigna radiata
NLNFFAFGINAENNQ

SEQ ID NO: 2449 - protein, 15 aa, Vigna radiata
LQRFDQRSKQMQNLE

SEQ ID NO: 2450 - protein, 15 aa, Vigna radiata
LSSTEAQQSYLQGFS

SEQ ID NO: 2451 - protein, 15 aa, Vigna radiata
SSTEAQQSYLQGFSK

SEQ ID NO: 2452 - protein, 15 aa, Anacardium occidentale
DNGIEETICTMRLKE

SEQ ID NO: 2453 - protein, 15 aa, Glycine max
INAENNQRNFLAGSQ

SEQ ID NO: 2454 - protein, 15 aa, Sesamum indicum
HWNLNAHSIIYITRG

SEQ ID NO: 2455 - protein, 15 aa, Corylus avellana
HWNLNAHSVVYAIRG

SEQ ID NO: 2456 - protein, 15 aa, Pistacia vera
LPILRFLQLSAKKGV

SEQ ID NO: 2457 - protein, 15 aa, Pistacia vera
HWNVNAHSIVYITRG

SEQ ID NO: 2458 - protein, 15 aa, Pistacia vera
HWNFNAHSIVYGCKG

SEQ ID NO: 2459 - protein, 15 aa, Anacardium occidentale
NLPILKWLQLSVEKG

SEQ ID NO: 2460 - protein, 15 aa, Anacardium occidentale
DIIAIPAGVAHWCYN

SEQ ID NO: 2461 - protein, 15 aa, Arachis hypogaea
SSELHLLGFGINAEN

SEQ ID NO: 2462 - protein, 15 aa, Arachis hypogaea
INAENNHRIFLAGDK

SEQ ID NO: 2463 - protein, 15 aa, Bertholletia excelsa
QLDQNPRHFFLAGNI

SEQ ID NO: 2464 - protein, 15 aa, Carya illinoinensis
INGKNNQRNFLAGQN

SEQ ID NO: 2465 - protein, 15 aa, Carya illinoinensis
QLDQNPRNFYLAGNP

SEQ ID NO: 2466 - protein, 15 aa, Carya illinoinensis
DIIAFPAGVAHWCYN

SEQ ID NO: 2467 - protein, 15 aa, Carya illinoinensis
RDDNGLEETICTLSL

SEQ ID NO: 2468 - protein, 15 aa, Carya illinoinensis
HWNLNAHSVVYALRG

SEQ ID NO: 2469 - protein, 15 aa, Carya illinoinensis
AGRTSAIRALPEEVL

SEQ ID NO: 2470 - protein, 15 aa, Corylus avellana
DIIALPAGVAHWCYN

SEQ ID NO: 2471 - protein, 15 aa, Corylus avellana
QLDENPRHFYLAGNP

SEQ ID NO: 2472 - protein, 15 aa, Glycine max
NAENNQRNFLAGSQD

SEQ ID NO: 2473 - protein, 15 aa, Glycine max
GINAENNQRNFLAGS

SEQ ID NO: 2474 - protein, 15 aa, Juglans nigra
QLDQNPRNFYLAGNP

SEQ ID NO: 2475 - protein, 15 aa, Juglans nigra
RDDNGLEETICTLRL

SEQ ID NO: 2476 - protein, 15 aa, Juglans nigra
HWNLNAHSVVYALRG

SEQ ID NO: 2477 - protein, 15 aa, Juglans nigra
AGRTSAIRALPEEVL

SEQ ID NO: 2478 - protein, 15 aa, Juglans nigra
DVIAFPAGVAHWCYN

SEQ ID NO: 2479 - protein, 15 aa, Juglans regia
NGENNQRDFLAGQNN

SEQ ID NO: 2480 - protein, 15 aa, Juglans regia
QLDQNPRNFYLAGNP

SEQ ID NO: 2481 - protein, 15 aa, Juglans regia
RDDNGLEETICTLRL

SEQ ID NO: 2482 - protein, 15 aa, Juglans regia
HWNLNAHSVVYALRG

SEQ ID NO: 2483 - protein, 15 aa, Juglans regia
AGRTSAIRALPEEVL

SEQ ID NO: 2484 - protein, 15 aa, Juglans regia
DIIAFPAGVAHWSYN

SEQ ID NO: 2485 - protein, 15 aa, Lens culinaris
INAKNNQRNFLAGEE

SEQ ID NO: 2486 - protein, 15 aa, Lupinus albus
SSNLRLLGFGINAYE

SEQ ID NO: 2487 - protein, 15 aa, Lupinus angustifolius
SSNLRLLGFGINANE

SEQ ID NO: 2488 - protein, 15 aa, Pisum sativum
INAENNERNFLAGEE

SEQ ID NO: 2489 - protein, 15 aa, Pisum sativum
INAENNERNFLSGSD

SEQ ID NO: 2490 - protein, 15 aa, Pisum sativum
ASSNLNLLGFGINAE

SEQ ID NO: 2491 - protein, 15 aa, Pistacia vera
DVIALPAGVAHWIYN

SEQ ID NO: 2492 - protein, 15 aa, Pistacia vera
NLPILKWLQLSAERG

SEQ ID NO: 2493 - protein, 15 aa, Prunus Dulcis
QLDQNPRKFYLAGNP

SEQ ID NO: 2494 - protein, 15 aa, Prunus Dulcis
HWNVNAHSVVYVIRG

SEQ ID NO: 2495 - protein, 15 aa, Vigna radiata
INAENNQRNFLAGEK

SEQ ID NO: 2496 - protein, 15 aa, Vigna radiata
FGINAENNQRNFLAG

SEQ ID NO: 2497 - protein, 15 aa, Anacardium occidentale
HWNLNSHSIIYGCKG

SEQ ID NO: 2498 - protein, 15 aa, Arachis hypogaea
GINAENNHRIFLAGD

SEQ ID NO: 2499 - protein, 15 aa, Arachis hypogaea
LLILRWLGLSAEYGN

SEQ ID NO: 2500 - protein, 15 aa, Arachis hypogaea
HYNTNAHSIIYALRG

SEQ ID NO: 2501 - protein, 15 aa, Bertholletia excelsa
DQNPRHFFLAGNIQR

SEQ ID NO: 2502 - protein, 15 aa, Carya illinoinensis
GINGKNNQRNFLAGQ

SEQ ID NO: 2503 - protein, 15 aa, Carya illinoinensis
HNLPILRWLQLSAER

SEQ ID NO: 2504 - protein, 15 aa, Carya illinoinensis
LYVPHWNLNAHSVVY

SEQ ID NO: 2505 - protein, 15 aa, Carya illinoinensis
LPILRWLQLSAERGA

SEQ ID NO: 2506 - protein, 15 aa, Juglans nigra
HTLPVLRWLQLSAER

SEQ ID NO: 2507 - protein, 15 aa, Juglans nigra
LYVPHWNLNAHSVVY

SEQ ID NO: 2508 - protein, 15 aa, Juglans nigra
NGLEETICTLRLREN

SEQ ID NO: 2509 - protein, 15 aa, Juglans regia
HTLPVLRWLQLSAER

SEQ ID NO: 2510 - protein, 15 aa, Juglans regia
LYVPHWNLNAHSVVY

SEQ ID NO: 2511 - protein, 15 aa, Juglans regia
NGLEETICTLRLREN

SEQ ID NO: 2512 - protein, 15 aa, Lens culinaris
FGINAKNNQRNFLAG

SEQ ID NO: 2513 - protein, 15 aa, Lens culinaris
GINAKNNQRNFLAGE

SEQ ID NO: 2514 - protein, 15 aa, Lupinus albus
GINAYENQRNFLAGS

SEQ ID NO: 2515 - protein, 15 aa, Lupinus angustifolius
GINANENQRNFLAGS

SEQ ID NO: 2516 - protein, 15 aa, Pisum sativum
GINAENNERNFLAGE

SEQ ID NO: 2517 - protein, 15 aa, Pisum sativum
FGINAENNERNFLAG

SEQ ID NO: 2518 - protein, 15 aa, Pisum sativum
GINAENNERNFLSGS

SEQ ID NO: 2519 - protein, 15 aa, Pisum sativum
NAENNERNFLSGSDD

SEQ ID NO: 2520 - protein, 15 aa, Pistacia vera
GLEETFCTMTLKYNI

SEQ ID NO: 2521 - protein, 15 aa, Pistacia vera
PHWNVNAHSIVYITR

SEQ ID NO: 2522 - protein, 15 aa, Pistacia vera
DNGLEETICTMKLKE

SEQ ID NO: 2523 - protein, 15 aa, Pistacia vera
LPILKWLQLSAERGV

SEQ ID NO: 2524 - protein, 15 aa, Pistacia vera
RDNGLEETICTMKLK

SEQ ID NO: 2525 - protein, 15 aa, Prunus Dulcis
DQNPRKFYLAGNPEN

SEQ ID NO: 2526 - protein, 15 aa, Prunus Dulcis
HNLPILRFLRLSAER

SEQ ID NO: 2527 - protein, 15 aa, Prunus Dulcis
GLEETFCSLRLKENI

SEQ ID NO: 2528 - protein, 15 aa, Sesamum indicum
GRQLDNGLEETFCTM

SEQ ID NO: 2529 - protein, 15 aa, Sesamum indicum
PHWNLNAHSIIYITR

SEQ ID NO: 2530 - protein, 15 aa, Sesamum indicum
EWISFKTNDNAMTSQ

SEQ ID NO: 2531 - protein, 15 aa, Sinapis alba
TLPILQYIRLSATRG

SEQ ID NO: 2532 - protein, 15 aa, Vigna radiata
GINAENNQRNFLAGE

SEQ ID NO: 2533 - protein, 15 aa, Vigna radiata
NAENNQRNFLAGEKD

SEQ ID NO: 2534 - protein, 15 aa, Anacardium occidentale
VLPHWNLNSHSIIYG

SEQ ID NO: 2535 - protein, 15 aa, Anacardium occidentale
LPHWNLNSHSIIYGC

SEQ ID NO: 2536 - protein, 15 aa, Anacardium occidentale
NGIEETICTMRLKEN

SEQ ID NO: 2537 - protein, 15 aa, Anacardium occidentale
EWISFKTNDRAMTSP

SEQ ID NO: 2538 - protein, 15 aa, Anacardium occidentale
AGVAHWCYNEGNSPV

SEQ ID NO: 2539 - protein, 15 aa, Arachis hypogaea
EIKEGALMLPHFNSK

SEQ ID NO: 2540 - protein, 15 aa, Arachis hypogaea
NALFVPHYNTNAHSI

SEQ ID NO: 2541 - protein, 15 aa, Arachis hypogaea
EFRPRGQHSRRERAG

SEQ ID NO: 2542 - protein, 15 aa, Arachis hypogaea
LRYQQQSRQSRRRSL

SEQ ID NO: 2543 - protein, 15 aa, Bertholletia excelsa
DIIAIPAGVALWCYN

SEQ ID NO: 2544 - protein, 15 aa, Bertholletia excelsa
AGVALWCYNDGDEDL

SEQ ID NO: 2545 - protein, 15 aa, Bertholletia excelsa
LDQNPRHFFLAGNIQ

SEQ ID NO: 2546 - protein, 15 aa, Carya illinoinensis
NGKNNQRNFLAGQNN

SEQ ID NO: 2547 - protein, 15 aa, Carya illinoinensis
FREGDIIAFPAGVAH

SEQ ID NO: 2548 - protein, 15 aa, Carya illinoinensis
PHWNLNAHSVVYALR

SEQ ID NO: 2549 - protein, 15 aa, Carya illinoinensis
LDQNPRNFYLAGNPD

SEQ ID NO: 2550 - protein, 15 aa, Carya illinoinensis
ALPEEVLVNAFQIPR

SEQ ID NO: 2551 - protein, 15 aa, Carya illinoinensis
EWVSFKTNENAMVSP

SEQ ID NO: 2552 - protein, 15 aa, Carya illinoinensis
VPHWNLNAHSVVYAL

SEQ ID NO: 2553 - protein, 15 aa, Carya illinoinensis
PAGVAHWCYNDGSSP

SEQ ID NO: 2554 - protein, 15 aa, Carya illinoinensis
DQNPRNFYLAGNPDD

SEQ ID NO: 2555 - protein, 15 aa, Carya illinoinensis
DNGLEETICTLSLRE

SEQ ID NO: 2556 - protein, 15 aa, Carya illinoinensis
GFEWVSFKTNENAMV

SEQ ID NO: 2557 - protein, 15 aa, Carya illinoinensis
AGVAHWCYNDGSSPV

SEQ ID NO: 2558 - protein, 15 aa, Carya illinoinensis
ALYVPHWNLNAHSVV

SEQ ID NO: 2559 - protein, 15 aa, Corylus avellana
DENPRHFYLAGNPDD

SEQ ID NO: 2560 - protein, 15 aa, Corylus avellana
LDENPRHFYLAGNPD

SEQ ID NO: 2561 - protein, 15 aa, Corylus avellana
FREGDIIALPAGVAH

SEQ ID NO: 2562 - protein, 15 aa, Corylus avellana
PHWNLNAHSVVYAIR

SEQ ID NO: 2563 - protein, 15 aa, Corylus avellana
VPHWNLNAHSVVYAI

SEQ ID NO: 2564 - protein, 15 aa, Corylus avellana
PAGVAHWCYNDGDSP

SEQ ID NO: 2565 - protein, 15 aa, Corylus avellana
AGVAHWCYNDGDSPV

SEQ ID NO: 2566 - protein, 15 aa, Fagopyrum esculentum
GRINTVNSNNLPILE

SEQ ID NO: 2567 - protein, 15 aa, Fagopyrum tataricum
GRINTVNSNNLPILE

SEQ ID NO: 2568 - protein, 15 aa, Glycine max
IGINAENNQRNFLAG

SEQ ID NO: 2569 - protein, 15 aa, Glycine max
HWNLNANSVIYVTRG

SEQ ID NO: 2570 - protein, 15 aa, Glycine max
QLDQTPRVFYLAGNP

SEQ ID NO: 2571 - protein, 15 aa, Juglans nigra
PHWNLNAHSVVYALR

SEQ ID NO: 2572 - protein, 15 aa, Juglans nigra
LDQNPRNFYLAGNPD

SEQ ID NO: 2573 - protein, 15 aa, Juglans nigra
DNGLEETICTLRLRE

SEQ ID NO: 2574 - protein, 15 aa, Juglans nigra
EWVSFKTNENAMVSP

SEQ ID NO: 2575 - protein, 15 aa, Juglans nigra
VPHWNLNAHSVVYAL

SEQ ID NO: 2576 - protein, 15 aa, Juglans nigra
FREGDVIAFPAGVAH

SEQ ID NO: 2577 - protein, 15 aa, Juglans nigra
DQNPRNFYLAGNPDD

SEQ ID NO: 2578 - protein, 15 aa, Juglans nigra
ALPEEVLANALQIPR

SEQ ID NO: 2579 - protein, 15 aa, Juglans nigra
AGVAHWCYNDGDTPV

SEQ ID NO: 2580 - protein, 15 aa, Juglans nigra
PAGVAHWCYNDGDTP

SEQ ID NO: 2581 - protein, 15 aa, Juglans nigra
ALYVPHWNLNAHSVV

SEQ ID NO: 2582 - protein, 15 aa, Juglans regia
PAGVAHWSYNDGSNP

SEQ ID NO: 2583 - protein, 15 aa, Juglans regia
FREGDIIAFPAGVAH

SEQ ID NO: 2584 - protein, 15 aa, Juglans regia
PHWNLNAHSVVYALR

SEQ ID NO: 2585 - protein, 15 aa, Juglans regia
LDQNPRNFYLAGNPD

SEQ ID NO: 2586 - protein, 15 aa, Juglans regia
ALPEEVLATAFQIPR

SEQ ID NO: 2587 - protein, 15 aa, Juglans regia
DNGLEETICTLRLRE

SEQ ID NO: 2588 - protein, 15 aa, Juglans regia
EWVSFKTNENAMVSP

SEQ ID NO: 2589 - protein, 15 aa, Juglans regia
VPHWNLNAHSVVYAL

SEQ ID NO: 2590 - protein, 15 aa, Juglans regia
DQNPRNFYLAGNPDD

SEQ ID NO: 2591 - protein, 15 aa, Juglans regia
AGVAHWSYNDGSNPV

SEQ ID NO: 2592 - protein, 15 aa, Juglans regia
ALYVPHWNLNAHSVV

SEQ ID NO: 2593 - protein, 15 aa, Lens culinaris
NAKNNQRNFLAGEED

SEQ ID NO: 2594 - protein, 15 aa, Lupinus albus
INAYENQRNFLAGSE

SEQ ID NO: 2595 - protein, 15 aa, Lupinus angustifolius
INANENQRNFLAGSE

SEQ ID NO: 2596 - protein, 15 aa, Pisum sativum
NAENNERNFLAGEED

SEQ ID NO: 2597 - protein, 15 aa, Pisum sativum
EINEGALMLPHYNSR

SEQ ID NO: 2598 - protein, 15 aa, Pistacia vera
EGDVIALPAGVAHWI

SEQ ID NO: 2599 - protein, 15 aa, Pistacia vera
EWISFKTNDRAMISP

SEQ ID NO: 2600 - protein, 15 aa, Pistacia vera
DIIALPAGVANWCYN

SEQ ID NO: 2601 - protein, 15 aa, Pistacia vera
AMPEEVLANAFQISR

SEQ ID NO: 2602 - protein, 15 aa, Pistacia vera
NGLEETICTMKLKEN

SEQ ID NO: 2603 - protein, 15 aa, Prunus Dulcis
SPHWNVNAHSVVYVI

SEQ ID NO: 2604 - protein, 15 aa, Prunus Dulcis
AGVAYWSYNDGDQEL

SEQ ID NO: 2605 - protein, 15 aa, Prunus Dulcis
LDQNPRKFYLAGNPE

SEQ ID NO: 2606 - protein, 15 aa, Sesamum indicum
SGAAHWCYNDGSEDL

SEQ ID NO: 2607 - protein, 15 aa, Sesamum indicum
NGLEETFCTMKFRTN

SEQ ID NO: 2608 - protein, 15 aa, Sesamum indicum
QKVHRLRQGDIVAIP

SEQ ID NO: 2609 - protein, 15 aa, Sesamum indicum
RNGLVAPHWNLNAHS

SEQ ID NO: 2610 - protein, 15 aa, Sesamum indicum
APHWNLNAHSIIYIT

SEQ ID NO: 2611 - protein, 15 aa, Sesamum indicum
GLEETLCTAKLRENL

SEQ ID NO: 2612 - protein, 15 aa, Sesamum indicum
VAPHWNLNAHSIIYI

SEQ ID NO: 2613 - protein, 15 aa, Sinapis alba
NGLEETICSMRTHEN

SEQ ID NO: 2614 - protein, 15 aa, Anacardium occidentale
YANITKGGMSVPFYN

SEQ ID NO: 2615 - protein, 15 aa, Anacardium occidentale
RRGDIIAIPAGVAHW

SEQ ID NO: 2616 - protein, 15 aa, Anacardium occidentale
RGDIIAIPAGVAHWC

SEQ ID NO: 2617 - protein, 15 aa, Anacardium occidentale
GQMLVVPQNFAVVKR

SEQ ID NO: 2618 - protein, 15 aa, Anacardium occidentale
SLNLPILKWLQLSVE

SEQ ID NO: 2619 - protein, 15 aa, Arachis hypogaea
NFGKLFEVKPDKKNP

SEQ ID NO: 2620 - protein, 15 aa, Arachis hypogaea
FSRNTLEAAFNAEFN

SEQ ID NO: 2621 - protein, 15 aa, Arachis hypogaea
NTLVLPKHADADNIL

SEQ ID NO: 2622 - protein, 15 aa, Arachis hypogaea
FAGENSFIDNLPEEV

SEQ ID NO: 2623 - protein, 15 aa, Arachis hypogaea
PHYNTNAHSIIYALR

SEQ ID NO: 2624 - protein, 15 aa, Arachis hypogaea
TNNNDNQLDQFPRRF

SEQ ID NO: 2625 - protein, 15 aa, Bertholletia excelsa
QNPRHFFLAGNIQRS

SEQ ID NO: 2626 - protein, 15 aa, Bertholletia excelsa
NQLDQNPRHFFLAGN

SEQ ID NO: 2627 - protein, 15 aa, Carya illinoinensis
SHNLPILRWLQLSAE

SEQ ID NO: 2628 - protein, 15 aa, Carya illinoinensis
ANQLDQNPRNFYLAG

SEQ ID NO: 2629 - protein, 15 aa, Carya illinoinensis
QNPRNFYLAGNPDDE

SEQ ID NO: 2630 - protein, 15 aa, Carya illinoinensis
REGDIIAFPAGVAHW

SEQ ID NO: 2631 - protein, 15 aa, Carya illinoinensis
DTHNNANQLDQNPRN

SEQ ID NO: 2632 - protein, 15 aa, Carya illinoinensis
EGDIIAFPAGVAHWC

SEQ ID NO: 2633 - protein, 15 aa, Carya illinoinensis
LDTHNNANQLDQNPR

SEQ ID NO: 2634 - protein, 15 aa, Carya illinoinensis
GGRDDNGLEETICTL

SEQ ID NO: 2635 - protein, 15 aa, Carya illinoinensis
NQLDQNPRNFYLAGN

SEQ ID NO: 2636 - protein, 15 aa, Carya illinoinensis
DDNGLEETICTLSLR

SEQ ID NO: 2637 - protein, 15 aa, Carya illinoinensis
NLPILRWLQLSAERG

SEQ ID NO: 2638 - protein, 15 aa, Carya illinoinensis
GDIIAFPAGVAHWCY

SEQ ID NO: 2639 - protein, 15 aa, Carya illinoinensis
WNLNAHSVVYALRGR

SEQ ID NO: 2640 - protein, 15 aa, Corylus avellana
DVNGFEETICSLRLR

SEQ ID NO: 2641 - protein, 15 aa, Corylus avellana
LYVPHWNLNAHSVVY

SEQ ID NO: 2642 - protein, 15 aa, Corylus avellana
REGDIIALPAGVAHW

SEQ ID NO: 2643 - protein, 15 aa, Corylus avellana
NQLDENPRHFYLAGN

SEQ ID NO: 2644 - protein, 15 aa, Corylus avellana
ENPRHFYLAGNPDDE

SEQ ID NO: 2645 - protein, 15 aa, Corylus avellana
WNLNAHSVVYAIRGR

SEQ ID NO: 2646 - protein, 15 aa, Corylus avellana
PVLRWLQLSAERGDL

SEQ ID NO: 2647 - protein, 15 aa, Corylus avellana
AGRTSAIRALPDDVL

SEQ ID NO: 2648 - protein, 15 aa, Corylus avellana
EGDIIALPAGVAHWC

SEQ ID NO: 2649 - protein, 15 aa, Corylus avellana
PDDVLANAFQISREE

SEQ ID NO: 2650 - protein, 15 aa, Corylus avellana
GDIIALPAGVAHWCY

SEQ ID NO: 2651 - protein, 15 aa, Fagopyrum esculentum
KTSVLRAIPVEVLAN

SEQ ID NO: 2652 - protein, 15 aa, Fagopyrum esculentum
QILVVPQGFAVVLKA

SEQ ID NO: 2653 - protein, 15 aa, Fagopyrum tataricum
KTSVLRAIPVEVLAN

SEQ ID NO: 2654 - protein, 15 aa, Fagopyrum tataricum
QILVVPQGFAVVLKA

SEQ ID NO: 2655 - protein, 15 aa, Glycine max
TPEKNPQLRDLDIFL

SEQ ID NO: 2656 - protein, 15 aa, Glycine max
FLAGSQDNVISQIPS

SEQ ID NO: 2657 - protein, 15 aa, Glycine max
NFLAGSQDNVISQIP

SEQ ID NO: 2658 - protein, 15 aa, Glycine max
LAGSQDNVISQIPSQ

SEQ ID NO: 2659 - protein, 15 aa, Glycine max
ALLLPHFNSKAIVIL

SEQ ID NO: 2660 - protein, 15 aa, Glycine max
AGSQDNVISQIPSQV

SEQ ID NO: 2661 - protein, 15 aa, Glycine max
DQTPRVFYLAGNPDI

SEQ ID NO: 2662 - protein, 15 aa, Glycine max
LDQTPRVFYLAGNPD

SEQ ID NO: 2663 - protein, 15 aa, Juglans nigra
REGDVIAFPAGVAHW

SEQ ID NO: 2664 - protein, 15 aa, Juglans nigra
EGDVIAFPAGVAHWC

SEQ ID NO: 2665 - protein, 15 aa, Juglans nigra
ANQLDQNPRNFYLAG

SEQ ID NO: 2666 - protein, 15 aa, Juglans nigra
QNPRNFYLAGNPDDE

SEQ ID NO: 2667 - protein, 15 aa, Juglans nigra
SHTLPVLRWLQLSAE

SEQ ID NO: 2668 - protein, 15 aa, Juglans nigra
DDNGLEETICTLRLR

SEQ ID NO: 2669 - protein, 15 aa, Juglans nigra
GDVIAFPAGVAHWCY

SEQ ID NO: 2670 - protein, 15 aa, Juglans nigra
GGRDDNGLEETICTL

SEQ ID NO: 2671 - protein, 15 aa, Juglans nigra
TLPVLRWLQLSAERG

SEQ ID NO: 2672 - protein, 15 aa, Juglans nigra
NQLDQNPRNFYLAGN

SEQ ID NO: 2673 - protein, 15 aa, Juglans nigra
PVLRWLQLSAERGAL

SEQ ID NO: 2674 - protein, 15 aa, Juglans nigra
DTTNNANQLDQNPRN

SEQ ID NO: 2675 - protein, 15 aa, Juglans nigra
WNLNAHSVVYALRGR

SEQ ID NO: 2676 - protein, 15 aa, Juglans regia
DTNNNANQLDQNPRN

SEQ ID NO: 2677 - protein, 15 aa, Juglans regia
ANQLDQNPRNFYLAG

SEQ ID NO: 2678 - protein, 15 aa, Juglans regia
QNPRNFYLAGNPDDE

SEQ ID NO: 2679 - protein, 15 aa, Juglans regia
REGDIIAFPAGVAHW

SEQ ID NO: 2680 - protein, 15 aa, Juglans regia
SHTLPVLRWLQLSAE

SEQ ID NO: 2681 - protein, 15 aa, Juglans regia
DDNGLEETICTLRLR

SEQ ID NO: 2682 - protein, 15 aa, Juglans regia
GGRDDNGLEETICTL

SEQ ID NO: 2683 - protein, 15 aa, Juglans regia
TLPVLRWLQLSAERG

SEQ ID NO: 2684 - protein, 15 aa, Juglans regia
NQLDQNPRNFYLAGN

SEQ ID NO: 2685 - protein, 15 aa, Juglans regia
PVLRWLQLSAERGAL

SEQ ID NO: 2686 - protein, 15 aa, Juglans regia
GDIIAFPAGVAHWSY

SEQ ID NO: 2687 - protein, 15 aa, Juglans regia
WNLNAHSVVYALRGR

SEQ ID NO: 2688 - protein, 15 aa, Juglans regia
EGDIIAFPAGVAHWS

SEQ ID NO: 2689 - protein, 15 aa, Lens culinaris
GFSKNILEAAFNTEY

SEQ ID NO: 2690 - protein, 15 aa, Lens culinaris
TPEKNPQLQDLDIFV

SEQ ID NO: 2691 - protein, 15 aa, Lens culinaris
NFLAGEEDNVISQIQ

SEQ ID NO: 2692 - protein, 15 aa, Lens culinaris
FLAGEEDNVISQIQR

SEQ ID NO: 2693 - protein, 15 aa, Lens culinaris
ITPEKNPQLQDLDIF

SEQ ID NO: 2694 - protein, 15 aa, Lupinus albus
NAYENQRNFLAGSED

SEQ ID NO: 2695 - protein, 15 aa, Lupinus albus
ALLLPHYNSKAIFIV

SEQ ID NO: 2696 - protein, 15 aa, Lupinus angustifolius
NANENQRNFLAGSED

SEQ ID NO: 2697 - protein, 15 aa, Lupinus angustifolius
FLAGSEDNVISQLDR

SEQ ID NO: 2698 - protein, 15 aa, Lupinus angustifolius
GFSKNTLEATFNTRY

SEQ ID NO: 2699 - protein, 15 aa, Lupinus angustifolius
TPERNPQVQDLDISL

SEQ ID NO: 2700 - protein, 15 aa, Lupinus angustifolius
NFLAGSEDNVISQLD

SEQ ID NO: 2701 - protein, 15 aa, Lupinus angustifolius
ALLLPHYNSKAIFIV

SEQ ID NO: 2702 - protein, 15 aa, Pisum sativum
GFSKNILEAAFNTNY

SEQ ID NO: 2703 - protein, 15 aa, Pisum sativum
DLNLIGFGINAENNE

SEQ ID NO: 2704 - protein, 15 aa, Pisum sativum
TPEKNQQLQDLDIFV

SEQ ID NO: 2705 - protein, 15 aa, Pisum sativum
NLLGFGINAENNERN

SEQ ID NO: 2706 - protein, 15 aa, Pisum sativum
TPEKKYPQLQDLDLF

SEQ ID NO: 2707 - protein, 15 aa, Pisum sativum
NLNLLGFGINAENNE

SEQ ID NO: 2708 - protein, 15 aa, Pistacia vera
GDVIALPAGVAHWIY

SEQ ID NO: 2709 - protein, 15 aa, Pistacia vera
GQLVVVPQNFAVVKR

SEQ ID NO: 2710 - protein, 15 aa, Pistacia vera
YVNITKGGMSGPFYN

SEQ ID NO: 2711 - protein, 15 aa, Pistacia vera
GRDNGLEETICTMKL

SEQ ID NO: 2712 - protein, 15 aa, Pistacia vera
SLNLPILKWLQLSAE

SEQ ID NO: 2713 - protein, 15 aa, Pistacia vera
RKGDIIALPAGVANW

SEQ ID NO: 2714 - protein, 15 aa, Pistacia vera
KGDIIALPAGVANWC

SEQ ID NO: 2715 - protein, 15 aa, Pistacia vera
PLAGSTSVLRAMPEE

SEQ ID NO: 2716 - protein, 15 aa, Pistacia vera
DMYPRKFNLAGNPED

SEQ ID NO: 2717 - protein, 15 aa, Pistacia vera
GQIFVVPQNFAVVKR

SEQ ID NO: 2718 - protein, 15 aa, Pistacia vera
GDIIALPAGVANWCY

SEQ ID NO: 2719 - protein, 15 aa, Pistacia vera
RGRDNGLEETICTMK

SEQ ID NO: 2720 - protein, 15 aa, Prunus Dulcis
LPILRFLRLSAERGF

SEQ ID NO: 2721 - protein, 15 aa, Prunus Dulcis
NLPILRFLRLSAERG

SEQ ID NO: 2722 - protein, 15 aa, Prunus Dulcis
PDEVLANAYQISREQ

SEQ ID NO: 2723 - protein, 15 aa, Prunus Dulcis
TLAGRTSFLRALPDE

SEQ ID NO: 2724 - protein, 15 aa, Prunus Dulcis
AGRTSFLRALPDEVL

SEQ ID NO: 2725 - protein, 15 aa, Prunus Dulcis
GRISTLNSHNLPILR

SEQ ID NO: 2726 - protein, 15 aa, Prunus Dulcis
SHNLPILRFLRLSAE

SEQ ID NO: 2727 - protein, 15 aa, Sesamum indicum
SPLAGYTSVIRAMPL

SEQ ID NO: 2728 - protein, 15 aa, Sesamum indicum
LDQTFRHFFLAGNPQ

SEQ ID NO: 2729 - protein, 15 aa, Sesamum indicum
QLDQTFRHFFLAGNP

SEQ ID NO: 2730 - protein, 15 aa, Sinapis alba
AGRTSALRALPLEVI

SEQ ID NO: 2731 - protein, 15 aa, Sinapis alba
NFEWISFKTNANAMI

SEQ ID NO: 2732 - protein, 15 aa, Sinapis alba
PILQYIRLSATRGIL

SEQ ID NO: 2733 - protein, 15 aa, Sinapis alba
DNGLEETICSMRTHE

SEQ ID NO: 2734 - protein, 15 aa, Vigna radiata
TPEKNPQLRDLDMFI

SEQ ID NO: 2735 - protein, 15 aa, Vigna radiata
SLLLPHYNSKAIVIL

SEQ ID NO: 2736 - protein, 15 aa, Anacardium occidentale
NENLEIVCFEVNAEG

SEQ ID NO: 2737 - protein, 15 aa, Anacardium occidentale
QMLVVPQNFAVVKRA

SEQ ID NO: 2738 - protein, 15 aa, Anacardium occidentale
LLPQYSNAPQLIYVV

SEQ ID NO: 2739 - protein, 15 aa, Anacardium occidentale
EGQMLVVPQNFAVVK

SEQ ID NO: 2740 - protein, 15 aa, Anacardium occidentale
WNLNSHSIIYGCKGK

SEQ ID NO: 2741 - protein, 15 aa, Anacardium occidentale
LPILKWLQLSVEKGV

SEQ ID NO: 2742 - protein, 15 aa, Anacardium occidentale
PQNFAVVKRAREERF

SEQ ID NO: 2743 - protein, 15 aa, Anacardium occidentale
DRHQKIRRFRRGDII

SEQ ID NO: 2744 - protein, 15 aa, Anacardium occidentale
QRDNGIEETICTMRL

SEQ ID NO: 2745 - protein, 15 aa, Arachis hypogaea
ELHLLGFGINAENNH

SEQ ID NO: 2746 - protein, 15 aa, Arachis hypogaea
YLQGFSRNTLEAAFN

SEQ ID NO: 2747 - protein, 15 aa, Arachis hypogaea
FGINAENNHRIFLAG

SEQ ID NO: 2748 - protein, 15 aa, Arachis hypogaea
HLLGFGINAENNHRI

SEQ ID NO: 2749 - protein, 15 aa, Arachis hypogaea
GHVLVVPQNFAVAGK

SEQ ID NO: 2750 - protein, 15 aa, Arachis hypogaea
PQEIFIQQGRGYFGL

SEQ ID NO: 2751 - protein, 15 aa, Bertholletia excelsa
GGGYNGLEETICSAT

SEQ ID NO: 2752 - protein, 15 aa, Bertholletia excelsa
VLMPGCPETFQSMSQ

SEQ ID NO: 2753 - protein, 15 aa, Carya illinoinensis
FGINGKNNQRNFLAG

SEQ ID NO: 2754 - protein, 15 aa, Carya illinoinensis
VIPAGHPIAITASQN

SEQ ID NO: 2755 - protein, 15 aa, Carya illinoinensis
ETICTLSLRENIGDP

SEQ ID NO: 2756 - protein, 15 aa, Carya illinoinensis
AGRISTVNSHNLPIL

SEQ ID NO: 2757 - protein, 15 aa, Carya illinoinensis
AEVQVVDNFGQTVFD

SEQ ID NO: 2758 - protein, 15 aa, Carya illinoinensis
LLPHYSNAPQLVYIA

SEQ ID NO: 2759 - protein, 15 aa, Carya illinoinensis
GVLFPGCPETFEESQ

SEQ ID NO: 2760 - protein, 15 aa, Carya illinoinensis
GRISTVNSHNLPILR

SEQ ID NO: 2761 - protein, 15 aa, Carya illinoinensis
RISTVNSHNLPILRW

SEQ ID NO: 2762 - protein, 15 aa, Carya illinoinensis
QQDRHQKIRHFREGD

SEQ ID NO: 2763 - protein, 15 aa, Carya illinoinensis
QDRHQKIRHFREGDI

SEQ ID NO: 2764 - protein, 15 aa, Carya illinoinensis
EAGRISTVNSHNLPI

SEQ ID NO: 2765 - protein, 15 aa, Carya illinoinensis
AHSVVYALRGRAEVQ

SEQ ID NO: 2766 - protein, 15 aa, Corylus avellana
LRRGVVFVAPAGHPV

SEQ ID NO: 2767 - protein, 15 aa, Corylus avellana
EQDRHQKIRHFREGD

SEQ ID NO: 2768 - protein, 15 aa, Corylus avellana
REGLYVPHWNLNAHS

SEQ ID NO: 2769 - protein, 15 aa, Corylus avellana
ANQLDENPRHFYLAG

SEQ ID NO: 2770 - protein, 15 aa, Corylus avellana
EGLYVPHWNLNAHSV

SEQ ID NO: 2771 - protein, 15 aa, Corylus avellana
QDRHQKIRHFREGDI

SEQ ID NO: 2772 - protein, 15 aa, Corylus avellana
RINTVNSNTLPVLRW

SEQ ID NO: 2773 - protein, 15 aa, Corylus avellana
LLPQYSNAPELIYIE

SEQ ID NO: 2774 - protein, 15 aa, Corylus avellana
ETICSLRLRENICTR

SEQ ID NO: 2775 - protein, 15 aa, Corylus avellana
GVLFPGCPETFEDPQ

SEQ ID NO: 2776 - protein, 15 aa, Corylus avellana
VAHWCYNDGDSPVVT

SEQ ID NO: 2777 - protein, 15 aa, Fagopyrum esculentum
NTVNSNNLPILEFIQ

SEQ ID NO: 2778 - protein, 15 aa, Fagopyrum esculentum
VLYKNAILGPRWNLN

SEQ ID NO: 2779 - protein, 15 aa, Fagopyrum esculentum
RINTVNSNNLPILEF

SEQ ID NO: 2780 - protein, 15 aa, Fagopyrum esculentum
PILEFIDMSAEKGHL

SEQ ID NO: 2781 - protein, 15 aa, Fagopyrum tataricum
NTVNSNNLPILEFIQ

SEQ ID NO: 2782 - protein, 15 aa, Fagopyrum tataricum
VLYKNAILGPRWNLN

SEQ ID NO: 2783 - protein, 15 aa, Fagopyrum tataricum
RINTVNSNNLPILEF

SEQ ID NO: 2784 - protein, 15 aa, Glycine max
PEKNPQLRDLDIFLS

SEQ ID NO: 2785 - protein, 15 aa, Glycine max
RNFLAGSQDNVISQI

SEQ ID NO: 2786 - protein, 15 aa, Glycine max
GALLLPHFNSKAIVI

SEQ ID NO: 2787 - protein, 15 aa, Glycine max
AENNQRNFLAGSQDN

SEQ ID NO: 2788 - protein, 15 aa, Glycine max
NNQRNFLAGSQDNVI

SEQ ID NO: 2789 - protein, 15 aa, Glycine max
ITPEKNPQLRDLDIF

SEQ ID NO: 2790 - protein, 15 aa, Glycine max
NQRNFLAGSQDNVIS

SEQ ID NO: 2791 - protein, 15 aa, Glycine max
QRNFLAGSQDNVISQ

SEQ ID NO: 2792 - protein, 15 aa, Glycine max
VAIPGCPETFEEPQE

SEQ ID NO: 2793 - protein, 15 aa, Glycine max
QTPRVFYLAGNPDIE

SEQ ID NO: 2794 - protein, 15 aa, Glycine max
DSHQKIRHFNEGDVL

SEQ ID NO: 2795 - protein, 15 aa, Juglans nigra
EAGRISTANSHTLPV

SEQ ID NO: 2796 - protein, 15 aa, Juglans nigra
NQQFQCAGVAVVRRT

SEQ ID NO: 2797 - protein, 15 aa, Juglans nigra
AEVQVVDNFGQTVFD

SEQ ID NO: 2798 - protein, 15 aa, Juglans nigra
GVLFPGCPETFEESQ

SEQ ID NO: 2799 - protein, 15 aa, Juglans nigra
MDTTNNANQLDQNPR

SEQ ID NO: 2800 - protein, 15 aa, Juglans nigra
QRDRHQKIRHFREGD

SEQ ID NO: 2801 - protein, 15 aa, Juglans nigra
ETICTLRLRENIGDP

SEQ ID NO: 2802 - protein, 15 aa, Juglans nigra
RDRHQKIRHFREGDV

SEQ ID NO: 2803 - protein, 15 aa, Juglans nigra
LLPQYSNAPQLLYIV

SEQ ID NO: 2804 - protein, 15 aa, Juglans nigra
AHSVVYALRGRAEVQ

SEQ ID NO: 2805 - protein, 15 aa, Juglans regia
VIPAGHPIAITASQN

SEQ ID NO: 2806 - protein, 15 aa, Juglans regia
LDTNNNANQLDQNPR

SEQ ID NO: 2807 - protein, 15 aa, Juglans regia
NQQFQCAGVAVVRRT

SEQ ID NO: 2808 - protein, 15 aa, Juglans regia
AEVQVVDNFGQTVFD

SEQ ID NO: 2809 - protein, 15 aa, Juglans regia
GVLFPGCPETFEESQ

SEQ ID NO: 2810 - protein, 15 aa, Juglans regia
EAGRISTVNSHTLPV

SEQ ID NO: 2811 - protein, 15 aa, Juglans regia
AGRISTVNSHTLPVL

SEQ ID NO: 2812 - protein, 15 aa, Juglans regia
QQDRHQKIRHFREGD

SEQ ID NO: 2813 - protein, 15 aa, Juglans regia
LLPQYSNAPQLVYIA

SEQ ID NO: 2814 - protein, 15 aa, Juglans regia
QDRHQKIRHFREGDI

SEQ ID NO: 2815 - protein, 15 aa, Juglans regia
ISTVNSHTLPVLRWL

SEQ ID NO: 2816 - protein, 15 aa, Juglans regia
ETICTLRLRENIGDP

SEQ ID NO: 2817 - protein, 15 aa, Juglans regia
RISTVNSHTLPVLRW

SEQ ID NO: 2818 - protein, 15 aa, Juglans regia
AHSVVYALRGRAEVQ

SEQ ID NO: 2819 - protein, 15 aa, Lens culinaris
PAGHPVAINASSDLN

SEQ ID NO: 2820 - protein, 15 aa, Lens culinaris
NNQRNFLAGEEDNVI

SEQ ID NO: 2821 - protein, 15 aa, Lens culinaris
QRNFLAGEEDNVISQ

SEQ ID NO: 2822 - protein, 15 aa, Lens culinaris
RNFLAGEEDNVISQI

SEQ ID NO: 2823 - protein, 15 aa, Lens culinaris
AGEEDNVISQIQRPV

SEQ ID NO: 2824 - protein, 15 aa, Lens culinaris
NQRNFLAGEEDNVIS

SEQ ID NO: 2825 - protein, 15 aa, Lens culinaris
VIPAGHPVAINASSD

SEQ ID NO: 2826 - protein, 15 aa, Lens culinaris
LAGEEDNVISQIQRP

SEQ ID NO: 2827 - protein, 15 aa, Lens culinaris
PEKNPQLQDLDIFVN

SEQ ID NO: 2828 - protein, 15 aa, Lupinus albus
FGINAYENQRNFLAG

SEQ ID NO: 2829 - protein, 15 aa, Lupinus albus
RNFLAGSEDNVIRQL

SEQ ID NO: 2830 - protein, 15 aa, Lupinus albus
QRNFLAGSEDNVIRQ

SEQ ID NO: 2831 - protein, 15 aa, Lupinus albus
EGALLLPHYNSKAIF

SEQ ID NO: 2832 - protein, 15 aa, Lupinus albus
GALLLPHYNSKAIFI

SEQ ID NO: 2833 - protein, 15 aa, Lupinus angustifolius
RNFLAGSEDNVISQL

SEQ ID NO: 2834 - protein, 15 aa, Lupinus angustifolius
FGINANENQRNFLAG

SEQ ID NO: 2835 - protein, 15 aa, Lupinus angustifolius
PERNPQVQDLDISLT

SEQ ID NO: 2836 - protein, 15 aa, Lupinus angustifolius
LAGSEDNVISQLDRE

SEQ ID NO: 2837 - protein, 15 aa, Lupinus angustifolius
EGALLLPHYNSKAIF

SEQ ID NO: 2838 - protein, 15 aa, Lupinus angustifolius
QRNFLAGSEDNVISQ

SEQ ID NO: 2839 - protein, 15 aa, Lupinus angustifolius
ITPERNPQVQDLDIS

SEQ ID NO: 2840 - protein, 15 aa, Lupinus angustifolius
GALLLPHYNSKAIFI

SEQ ID NO: 2841 - protein, 15 aa, Pisum sativum
PAGHPVAINASSDLN

SEQ ID NO: 2842 - protein, 15 aa, Pisum sativum
IGFGINAENNERNFL

SEQ ID NO: 2843 - protein, 15 aa, Pisum sativum
ERNFLAGEEDNVISQ

SEQ ID NO: 2844 - protein, 15 aa, Pisum sativum
NFLAGEEDNVISQVE

SEQ ID NO: 2845 - protein, 15 aa, Pisum sativum
SDLNLIGFGINAENN

SEQ ID NO: 2846 - protein, 15 aa, Pisum sativum
NERNFLAGEEDNVIS

SEQ ID NO: 2847 - protein, 15 aa, Pisum sativum
GFGINAENNERNFLA

SEQ ID NO: 2848 - protein, 15 aa, Pisum sativum
SSDLNLIGFGINAEN

SEQ ID NO: 2849 - protein, 15 aa, Pisum sativum
NNERNFLAGEEDNVI

SEQ ID NO: 2850 - protein, 15 aa, Pisum sativum
VIPAGHPVAINASSD

SEQ ID NO: 2851 - protein, 15 aa, Pisum sativum
RNFLAGEEDNVISQV

SEQ ID NO: 2852 - protein, 15 aa, Pisum sativum
ITPEKNQQLQDLDIF

SEQ ID NO: 2853 - protein, 15 aa, Pisum sativum
IPAGHPVAITASSNL

SEQ ID NO: 2854 - protein, 15 aa, Pisum sativum
PEKKYPQLQDLDLFV

SEQ ID NO: 2855 - protein, 15 aa, Pisum sativum
PAGHPVAITASSNLN

SEQ ID NO: 2856 - protein, 15 aa, Pisum sativum
EKKYPQLQDLDLFVS

SEQ ID NO: 2857 - protein, 15 aa, Pisum sativum
SSNLNLLGFGINAEN

SEQ ID NO: 2858 - protein, 15 aa, Pisum sativum
FSKNILEASYNTRYE

SEQ ID NO: 2859 - protein, 15 aa, Pisum sativum
LRGFSKNILEASYNT

SEQ ID NO: 2860 - protein, 15 aa, Pisum sativum
SNLNLLGFGINAENN

SEQ ID NO: 2861 - protein, 15 aa, Pistacia vera
WNVNAHSIVYITRGN

SEQ ID NO: 2862 - protein, 15 aa, Pistacia vera
EGQLVVVPQNFAVVK

SEQ ID NO: 2863 - protein, 15 aa, Pistacia vera
QLVVVPQNFAVVKRA

SEQ ID NO: 2864 - protein, 15 aa, Pistacia vera
NQNLEILCFEVNAEG

SEQ ID NO: 2865 - protein, 15 aa, Pistacia vera
QIFVVPQNFAVVKRA

SEQ ID NO: 2866 - protein, 15 aa, Pistacia vera
PQNFAVVKRARGQRF

SEQ ID NO: 2867 - protein, 15 aa, Pistacia vera
QVQVVDNFGNTVFDG

SEQ ID NO: 2868 - protein, 15 aa, Prunus Dulcis
QNPRKFYLAGNPENE

SEQ ID NO: 2869 - protein, 15 aa, Prunus Dulcis
PSYSNAPQLIYIVQG

SEQ ID NO: 2870 - protein, 15 aa, Prunus Dulcis
WNVNAHSVVYVIRGN

SEQ ID NO: 2871 - protein, 15 aa, Prunus Dulcis
EGDVVAIPAGVAYWS

SEQ ID NO: 2872 - protein, 15 aa, Prunus Dulcis
ETFCSLRLKENIGNP

SEQ ID NO: 2873 - protein, 15 aa, Prunus Dulcis
NQLDQNPRKFYLAGN

SEQ ID NO: 2874 - protein, 15 aa, Sesamum indicum
SDEILEAAFNTRRDR

SEQ ID NO: 2875 - protein, 15 aa, Sesamum indicum
LDQKFRAFYLAGGVP

SEQ ID NO: 2876 - protein, 15 aa, Sesamum indicum
NQQFECAGVAAVRNV

SEQ ID NO: 2877 - protein, 15 aa, Sesamum indicum
WNLNAHSIIYITRGS

SEQ ID NO: 2878 - protein, 15 aa, Sinapis alba
QKGQLVVIPQGFAYV

SEQ ID NO: 2879 - protein, 15 aa, Sinapis alba
NNFEWISFKTNANAM

SEQ ID NO: 2880 - protein, 15 aa, Sinapis alba
GQLVVIPQGFAYVVQ

SEQ ID NO: 2881 - protein, 15 aa, Vigna radiata
NNQRNFLAGEKDNVI

SEQ ID NO: 2882 - protein, 15 aa, Vigna radiata
NQRNFLAGEKDNVIS

SEQ ID NO: 2883 - protein, 15 aa, Vigna radiata
AENNQRNFLAGEKDN

SEQ ID NO: 2884 - protein, 15 aa, Vigna radiata
RNFLAGEKDNVISEI

SEQ ID NO: 2885 - protein, 15 aa, Vigna radiata
ITPEKNPQLRDLDMF

SEQ ID NO: 2886 - protein, 15 aa, Vigna radiata
GSLLLPHYNSKAIVI

SEQ ID NO: 2887 - protein, 15 aa, Vigna radiata
QRNFLAGEKDNVISE

SEQ ID NO: 2888 - protein, 15 aa, Anacardium occidentale
LKQCKHQCKVQRQYD

SEQ ID NO: 2889 - protein, 15 aa, Anacardium occidentale
DSIFFVSWGRGTITK

SEQ ID NO: 2890 - protein, 15 aa, Anacardium occidentale
KELAFKMEGEEVDKV

SEQ ID NO: 2891 - protein, 15 aa, Anacardium occidentale
VVPQNFAVVKRAREE

SEQ ID NO: 2892 - protein, 15 aa, Anacardium occidentale
NALVLPHWNLNSHSI

SEQ ID NO: 2893 - protein, 15 aa, Anacardium occidentale
FEWISFKTNDRAMTS

SEQ ID NO: 2894 - protein, 15 aa, Anacardium occidentale
LVVPQNFAVVKRARE

SEQ ID NO: 2895 - protein, 15 aa, Anacardium occidentale
RHQKIRRFRRGDIIA

SEQ ID NO: 2896 - protein, 15 aa, Anacardium occidentale
REGQMLVVPQNFAVV

SEQ ID NO: 2897 - protein, 15 aa, Anacardium occidentale
MPEEVLANAFQISRE

SEQ ID NO: 2898 - protein, 15 aa, Anacardium occidentale
VAHWCYNEGNSPVVT

SEQ ID NO: 2899 - protein, 15 aa, Anacardium occidentale
GLLLPQYSNAPQLIY

SEQ ID NO: 2900 - protein, 15 aa, Anacardium occidentale
VLANAFQISREDARK

SEQ ID NO: 2901 - protein, 15 aa, Arachis hypogaea
PNTLVLPKHADADNI

SEQ ID NO: 2902 - protein, 15 aa, Arachis hypogaea
GALMLPHFNSKAMVI

SEQ ID NO: 2903 - protein, 15 aa, Arachis hypogaea
SELHLLGFGINAENN

SEQ ID NO: 2904 - protein, 15 aa, Arachis hypogaea
ALMLPHFNSKAMVIV

SEQ ID NO: 2905 - protein, 15 aa, Arachis hypogaea
NAHSIIYALRGRAHV

SEQ ID NO: 2906 - protein, 15 aa, Arachis hypogaea
FVPHYNTNAHSIIYA

SEQ ID NO: 2907 - protein, 15 aa, Arachis hypogaea
VAGKSQSENFEYVAF

SEQ ID NO: 2908 - protein, 15 aa, Arachis hypogaea
TNAHSIIYALRGRAH

SEQ ID NO: 2909 - protein, 15 aa, Arachis hypogaea
YNTNAHSIIYALRGR

SEQ ID NO: 2910 - protein, 15 aa, Bertholletia excelsa
NGLEETICSATFIQN

SEQ ID NO: 2911 - protein, 15 aa, Bertholletia excelsa
LNQLDQNPRHFFLAG

SEQ ID NO: 2912 - protein, 15 aa, Bertholletia excelsa
RGILGVLMPGCPETF

SEQ ID NO: 2913 - protein, 15 aa, Bertholletia excelsa
FEWVVFNTNDNALFS

SEQ ID NO: 2914 - protein, 15 aa, Bertholletia excelsa
GVALWCYNDGDEDLV

SEQ ID NO: 2915 - protein, 15 aa, Carya illinoinensis
PAGHPIAITASQNEN

SEQ ID NO: 2916 - protein, 15 aa, Carya illinoinensis
DIFVIPAGHPIAITA

SEQ ID NO: 2917 - protein, 15 aa, Carya illinoinensis
LEREAKELSFNMPRE

SEQ ID NO: 2918 - protein, 15 aa, Carya illinoinensis
QQLQCAGVAVVRRTI

SEQ ID NO: 2919 - protein, 15 aa, Carya illinoinensis
DRHQKIRHFREGDII

SEQ ID NO: 2920 - protein, 15 aa, Carya illinoinensis
PQNFAVVKRARDEGF

SEQ ID NO: 2921 - protein, 15 aa, Carya illinoinensis
PRNFYLAGNPDDEFR

SEQ ID NO: 2922 - protein, 15 aa, Carya illinoinensis
GLLLPHYSNAPQLVY

SEQ ID NO: 2923 - protein, 15 aa, Carya illinoinensis
RGGRDDNGLEETICT

SEQ ID NO: 2924 - protein, 15 aa, Carya illinoinensis
DPNHQQLQCAGVAVV

SEQ ID NO: 2925 - protein, 15 aa, Carya illinoinensis
ISTVNSHNLPILRWL

SEQ ID NO: 2926 - protein, 15 aa, Carya illinoinensis
GVAHWCYNDGSSPVV

SEQ ID NO: 2927 - protein, 15 aa, Carya illinoinensis
NLNAHSVVYALRGRA

SEQ ID NO: 2928 - protein, 15 aa, Carya illinoinensis
VLFPGCPETFEESQR

SEQ ID NO: 2929 - protein, 15 aa, Carya illinoinensis
EEAGRISTVNSHNLP

SEQ ID NO: 2930 - protein, 15 aa, Carya illinoinensis
VYALRGRAEVQVVDN

SEQ ID NO: 2931 - protein, 15 aa, Carya illinoinensis
RGITGVLFPGCPETF

SEQ ID NO: 2932 - protein, 15 aa, Carya illinoinensis
RGRGITGVLFPGCPE

SEQ ID NO: 2933 - protein, 15 aa, Carya illinoinensis
SDALYVPHWNLNAHS

SEQ ID NO: 2934 - protein, 15 aa, Carya illinoinensis
HQQLQCAGVAVVRRT

SEQ ID NO: 2935 - protein, 15 aa, Carya illinoinensis
NHQQLQCAGVAVVRR

SEQ ID NO: 2936 - protein, 15 aa, Carya illinoinensis
VAHWCYNDGSSPVVA

SEQ ID NO: 2937 - protein, 15 aa, Carya illinoinensis
LNAHSVVYALRGRAE

SEQ ID NO: 2938 - protein, 15 aa, Carya illinoinensis
WDPNHQQLQCAGVAV

SEQ ID NO: 2939 - protein, 15 aa, Carya illinoinensis
GRDDNGLEETICTLS

SEQ ID NO: 2940 - protein, 15 aa, Carya illinoinensis
FQQDRHQKIRHFREG

SEQ ID NO: 2941 - protein, 15 aa, Carya illinoinensis
RHQKIRHFREGDIIA

SEQ ID NO: 2942 - protein, 15 aa, Corylus avellana
SEGFEWVAFKTNDNA

SEQ ID NO: 2943 - protein, 15 aa, Corylus avellana
DRHQKIRHFREGDII

SEQ ID NO: 2944 - protein, 15 aa, Corylus avellana
DHNDQQFQCAGVAVI

SEQ ID NO: 2945 - protein, 15 aa, Corylus avellana
ESEGFEWVAFKTNDN

SEQ ID NO: 2946 - protein, 15 aa, Corylus avellana
SEQDRHQKIRHFREG

SEQ ID NO: 2947 - protein, 15 aa, Corylus avellana
VYAIRGRARVQVVDD

SEQ ID NO: 2948 - protein, 15 aa, Corylus avellana
LNAHSVVYAIRGRAR

SEQ ID NO: 2949 - protein, 15 aa, Corylus avellana
RGITGVLFPGCPETF

SEQ ID NO: 2950 - protein, 15 aa, Corylus avellana
GVAHWCYNDGDSPVV

SEQ ID NO: 2951 - protein, 15 aa, Corylus avellana
PRHFYLAGNPDDEHQ

SEQ ID NO: 2952 - protein, 15 aa, Corylus avellana
GLYVPHWNLNAHSVV

SEQ ID NO: 2953 - protein, 15 aa, Corylus avellana
GRGRDVNGFEETICS

SEQ ID NO: 2954 - protein, 15 aa, Corylus avellana
EETICSLRLRENICT

SEQ ID NO: 2955 - protein, 15 aa, Corylus avellana
QQFQCAGVAVIRRTI

SEQ ID NO: 2956 - protein, 15 aa, Corylus avellana
DQQFQCAGVAVIRRT

SEQ ID NO: 2957 - protein, 15 aa, Corylus avellana
NLNAHSVVYAIRGRA

SEQ ID NO: 2958 - protein, 15 aa, Corylus avellana
GRGITGVLFPGCPET

SEQ ID NO: 2959 - protein, 15 aa, Corylus avellana
GFEWVAFKTNDNAQI

SEQ ID NO: 2960 - protein, 15 aa, Corylus avellana
VLFPGCPETFEDPQQ

SEQ ID NO: 2961 - protein, 15 aa, Corylus avellana
WDHNDQQFQCAGVAV

SEQ ID NO: 2962 - protein, 15 aa, Corylus avellana
TICSLRLRENICTRS

SEQ ID NO: 2963 - protein, 15 aa, Corylus avellana
RHQKIRHFREGDIIA

SEQ ID NO: 2964 - protein, 15 aa, Fagopyrum esculentum
LKNDDNAITSPIAGK

SEQ ID NO: 2965 - protein, 15 aa, Fagopyrum esculentum
FNPRAGRINTVNSNN

SEQ ID NO: 2966 - protein, 15 aa, Fagopyrum esculentum
RAIPVEVLANSYDIS

SEQ ID NO: 2967 - protein, 15 aa, Fagopyrum tataricum
LKNDDNAITSPIAGK

SEQ ID NO: 2968 - protein, 15 aa, Fagopyrum tataricum
FNPRAGRINTVNSNN

SEQ ID NO: 2969 - protein, 15 aa, Fagopyrum tataricum
RAIPVEVLANSYDIS

SEQ ID NO: 2970 - protein, 15 aa, Glycine max
ENNQRNFLAGSQDNV

SEQ ID NO: 2971 - protein, 15 aa, Glycine max
EGALLLPHFNSKAIV

SEQ ID NO: 2972 - protein, 15 aa, Glycine max
PNTLLLPNHADADYL

SEQ ID NO: 2973 - protein, 15 aa, Glycine max
FEITPEKNPQLRDLD

SEQ ID NO: 2974 - protein, 15 aa, Glycine max
EITPEKNPQLRDLDI

SEQ ID NO: 2975 - protein, 15 aa, Glycine max
AIGINAENNQRNFLA

SEQ ID NO: 2976 - protein, 15 aa, Glycine max
NTLLLPNHADADYLI

SEQ ID NO: 2977 - protein, 15 aa, Glycine max
PHWNLNANSVIYVTR

SEQ ID NO: 2978 - protein, 15 aa, Glycine max
PRVFYLAGNPDIEYP

SEQ ID NO: 2979 - protein, 15 aa, Juglans nigra
RHQKIRHFREGDVIA

SEQ ID NO: 2980 - protein, 15 aa, Juglans nigra
TIPQNFAVVKRARNE

SEQ ID NO: 2981 - protein, 15 aa, Juglans nigra
NNQQFQCAGVAVVRR

SEQ ID NO: 2982 - protein, 15 aa, Juglans nigra
PRNFYLAGNPDDEFR

SEQ ID NO: 2983 - protein, 15 aa, Juglans nigra
QQFQCAGVAVVRRTI

SEQ ID NO: 2984 - protein, 15 aa, Juglans nigra
RGGRDDNGLEETICT

SEQ ID NO: 2985 - protein, 15 aa, Juglans nigra
GLLLPQYSNAPQLLY

SEQ ID NO: 2986 - protein, 15 aa, Juglans nigra
DRHQKIRHFREGDVI

SEQ ID NO: 2987 - protein, 15 aa, Juglans nigra
VLFPGCPETFEESQQ

SEQ ID NO: 2988 - protein, 15 aa, Juglans nigra
NLNAHSVVYALRGRA

SEQ ID NO: 2989 - protein, 15 aa, Juglans nigra
GVAHWCYNDGDTPVV

SEQ ID NO: 2990 - protein, 15 aa, Juglans nigra
VYALRGRAEVQVVDN

SEQ ID NO: 2991 - protein, 15 aa, Juglans nigra
RGITGVLFPGCPETF

SEQ ID NO: 2992 - protein, 15 aa, Juglans nigra
SDALYVPHWNLNAHS

SEQ ID NO: 2993 - protein, 15 aa, Juglans nigra
VAHWCYNDGDTPVVA

SEQ ID NO: 2994 - protein, 15 aa, Juglans nigra
GRDDNGLEETICTLR

SEQ ID NO: 2995 - protein, 15 aa, Juglans nigra
EETICTLRLRENIGD

SEQ ID NO: 2996 - protein, 15 aa, Juglans nigra
GFEWVSFKTNENAMV

SEQ ID NO: 2997 - protein, 15 aa, Juglans nigra
WDPNNQQFQCAGVAV

SEQ ID NO: 2998 - protein, 15 aa, Juglans nigra
LNAHSVVYALRGRAE

SEQ ID NO: 2999 - protein, 15 aa, Juglans nigra
EEAGRISTANSHTLP

SEQ ID NO: 3000 - protein, 15 aa, Juglans nigra
DPNNQQFQCAGVAVV

SEQ ID NO: 3001 - protein, 15 aa, Juglans nigra
PQNFAVVKRARNEGF

SEQ ID NO: 3002 - protein, 15 aa, Juglans regia
INGENNQRDFLAGQN

SEQ ID NO: 3003 - protein, 15 aa, Juglans regia
PAGHPIAITASQNEN

SEQ ID NO: 3004 - protein, 15 aa, Juglans regia
DIFVIPAGHPIAITA

SEQ ID NO: 3005 - protein, 15 aa, Juglans regia
LEREAKELSFNMPRE

SEQ ID NO: 3006 - protein, 15 aa, Juglans regia
TIPQNFAVVKRARNE

SEQ ID NO: 3007 - protein, 15 aa, Juglans regia
DRHQKIRHFREGDII

SEQ ID NO: 3008 - protein, 15 aa, Juglans regia
NNQQFQCAGVAVVRR

SEQ ID NO: 3009 - protein, 15 aa, Juglans regia
PRNFYLAGNPDDEFR

SEQ ID NO: 3010 - protein, 15 aa, Juglans regia
QQFQCAGVAVVRRTI

SEQ ID NO: 3011 - protein, 15 aa, Juglans regia
RGGRDDNGLEETICT

SEQ ID NO: 3012 - protein, 15 aa, Juglans regia
NLNAHSVVYALRGRA

SEQ ID NO: 3013 - protein, 15 aa, Juglans regia
VLFPGCPETFEESQR

SEQ ID NO: 3014 - protein, 15 aa, Juglans regia
VYALRGRAEVQVVDN

SEQ ID NO: 3015 - protein, 15 aa, Juglans regia
RGITGVLFPGCPETF

SEQ ID NO: 3016 - protein, 15 aa, Juglans regia
RGRGITGVLFPGCPE

SEQ ID NO: 3017 - protein, 15 aa, Juglans regia
SDALYVPHWNLNAHS

SEQ ID NO: 3018 - protein, 15 aa, Juglans regia
GRDDNGLEETICTLR

SEQ ID NO: 3019 - protein, 15 aa, Juglans regia
GLLLPQYSNAPQLVY

SEQ ID NO: 3020 - protein, 15 aa, Juglans regia
EETICTLRLRENIGD

SEQ ID NO: 3021 - protein, 15 aa, Juglans regia
VVAISLLDTNNNANQ

SEQ ID NO: 3022 - protein, 15 aa, Juglans regia
GFEWVSFKTNENAMV

SEQ ID NO: 3023 - protein, 15 aa, Juglans regia
WDPNNQQFQCAGVAV

SEQ ID NO: 3024 - protein, 15 aa, Juglans regia
LNAHSVVYALRGRAE

SEQ ID NO: 3025 - protein, 15 aa, Juglans regia
EEAGRISTVNSHTLP

SEQ ID NO: 3026 - protein, 15 aa, Juglans regia
DPNNQQFQCAGVAVV

SEQ ID NO: 3027 - protein, 15 aa, Juglans regia
PQNFAVVKRARNEGF

SEQ ID NO: 3028 - protein, 15 aa, Juglans regia
VAHWSYNDGSNPVVA

SEQ ID NO: 3029 - protein, 15 aa, Juglans regia
FQQDRHQKIRHFREG

SEQ ID NO: 3030 - protein, 15 aa, Juglans regia
RHQKIRHFREGDIIA

SEQ ID NO: 3031 - protein, 15 aa, Lens culinaris
GDVLVIPAGHPVAIN

SEQ ID NO: 3032 - protein, 15 aa, Lens culinaris
GFGINAKNNQRNFLA

SEQ ID NO: 3033 - protein, 15 aa, Lens culinaris
KNNQRNFLAGEEDNV

SEQ ID NO: 3034 - protein, 15 aa, Lens culinaris
FEITPEKNPQLQDLD

SEQ ID NO: 3035 - protein, 15 aa, Lens culinaris
EITPEKNPQLQDLDI

SEQ ID NO: 3036 - protein, 15 aa, Lens culinaris
IGFGINAKNNQRNFL

SEQ ID NO: 3037 - protein, 15 aa, Lens culinaris
DVLVIPAGHPVAINA

SEQ ID NO: 3038 - protein, 15 aa, Lupinus albus
PNTLILPKHSDADYV

SEQ ID NO: 3039 - protein, 15 aa, Lupinus albus
GFSRNTLEATFNTRY

SEQ ID NO: 3040 - protein, 15 aa, Lupinus albus
EFQSKPNTLILPKHS

SEQ ID NO: 3041 - protein, 15 aa, Lupinus albus
NFLAGSEDNVIRQLD

SEQ ID NO: 3042 - protein, 15 aa, Lupinus albus
NTLILPKHSDADYVL

SEQ ID NO: 3043 - protein, 15 aa, Lupinus albus
SNLRLLGFGINAYEN

SEQ ID NO: 3044 - protein, 15 aa, Lupinus angustifolius
EFQSNPNTLILPKHS

SEQ ID NO: 3045 - protein, 15 aa, Lupinus angustifolius
SNLRLLGFGINANEN

SEQ ID NO: 3046 - protein, 15 aa, Lupinus angustifolius
PNTLILPKHSDADYI

SEQ ID NO: 3047 - protein, 15 aa, Lupinus angustifolius
AGSEDNVISQLDREV

SEQ ID NO: 3048 - protein, 15 aa, Lupinus angustifolius
NTLILPKHSDADYIL

SEQ ID NO: 3049 - protein, 15 aa, Pisum sativum
EITPEKNQQLQDLDI

SEQ ID NO: 3050 - protein, 15 aa, Pisum sativum
PEKNQQLQDLDIFVN

SEQ ID NO: 3051 - protein, 15 aa, Pisum sativum
IPAGHPVAINASSDL

SEQ ID NO: 3052 - protein, 15 aa, Pisum sativum
FEITPEKNQQLQDLD

SEQ ID NO: 3053 - protein, 15 aa, Pisum sativum
DVFVIPAGHPVAINA

SEQ ID NO: 3054 - protein, 15 aa, Pisum sativum
FLAGEEDNVISQVER

SEQ ID NO: 3055 - protein, 15 aa, Pisum sativum
GDVFVIPAGHPVAIN

SEQ ID NO: 3056 - protein, 15 aa, Pisum sativum
GFGINAENNERNFLS

SEQ ID NO: 3057 - protein, 15 aa, Pisum sativum
GALMLPHYNSRAIVV

SEQ ID NO: 3058 - protein, 15 aa, Pisum sativum
FGINAENNERNFLSG

SEQ ID NO: 3059 - protein, 15 aa, Pisum sativum
GDVVIIPAGHPVAIT

SEQ ID NO: 3060 - protein, 15 aa, Pisum sativum
EITPEKKYPQLQDLD

SEQ ID NO: 3061 - protein, 15 aa, Pisum sativum
DVVIIPAGHPVAITA

SEQ ID NO: 3062 - protein, 15 aa, Pisum sativum
LGFGINAENNERNFL

SEQ ID NO: 3063 - protein, 15 aa, Pistacia vera
DKFEWVSFKTNGLSQ

SEQ ID NO: 3064 - protein, 15 aa, Pistacia vera
APHWNVNAHSIVYIT

SEQ ID NO: 3065 - protein, 15 aa, Pistacia vera
RDAILAPHWNVNAHS

SEQ ID NO: 3066 - protein, 15 aa, Pistacia vera
VVPQNFAVVKRASSD

SEQ ID NO: 3067 - protein, 15 aa, Pistacia vera
VVVPQNFAVVKRASS

SEQ ID NO: 3068 - protein, 15 aa, Pistacia vera
LKQCKHQCKVQRQYD

SEQ ID NO: 3069 - protein, 15 aa, Pistacia vera
DSIFFVSWGRGTITK

SEQ ID NO: 3070 - protein, 15 aa, Pistacia vera
KELAFKTKGEEVDKV

SEQ ID NO: 3071 - protein, 15 aa, Pistacia vera
EVSEGQIFVVPQNFA

SEQ ID NO: 3072 - protein, 15 aa, Pistacia vera
FVVPQNFAVVKRARG

SEQ ID NO: 3073 - protein, 15 aa, Pistacia vera
FEWISFKTNDRAMIS

SEQ ID NO: 3074 - protein, 15 aa, Pistacia vera
PHWNFNAHSIVYGCK

SEQ ID NO: 3075 - protein, 15 aa, Pistacia vera
VVPQNFAVVKRARGQ

SEQ ID NO: 3076 - protein, 15 aa, Pistacia vera
VLANAFQISREDARK

SEQ ID NO: 3077 - protein, 15 aa, Prunus Dulcis
NGLHLPSYSNAPQLI

SEQ ID NO: 3078 - protein, 15 aa, Prunus Dulcis
VLANAYQISREQARQ

SEQ ID NO: 3079 - protein, 15 aa, Prunus Dulcis
NVNAHSVVYVIRGNA

SEQ ID NO: 3080 - protein, 15 aa, Prunus Dulcis
RISTLNSHNLPILRF

SEQ ID NO: 3081 - protein, 15 aa, Prunus Dulcis
GVAYWSYNDGDQELV

SEQ ID NO: 3082 - protein, 15 aa, Prunus Dulcis
TFCSLRLKENIGNPE

SEQ ID NO: 3083 - protein, 15 aa, Prunus Dulcis
HNQLDQNPRKFYLAG

SEQ ID NO: 3084 - protein, 15 aa, Prunus Dulcis
ADIFSPRAGRISTLN

SEQ ID NO: 3085 - protein, 15 aa, Sesamum indicum
LKQCKHQCKAQQQIS

SEQ ID NO: 3086 - protein, 15 aa, Sesamum indicum
LEREAKELAFGMPAR

SEQ ID NO: 3087 - protein, 15 aa, Sesamum indicum
LSNQLDQKFRAFYLA

SEQ ID NO: 3088 - protein, 15 aa, Sesamum indicum
QQFECAGVAAVRNVI

SEQ ID NO: 3089 - protein, 15 aa, Sesamum indicum
DRNNQQFECAGVAAV

SEQ ID NO: 3090 - protein, 15 aa, Sesamum indicum
LDTGNAANQLDQTFR

SEQ ID NO: 3091 - protein, 15 aa, Sinapis alba
FEWISFKTNANAMIS

SEQ ID NO: 3092 - protein, 15 aa, Sinapis alba
EWISFKTNANAMIST

SEQ ID NO: 3093 - protein, 15 aa, Vigna radiata
ENNQRNFLAGEKDNV

SEQ ID NO: 3094 - protein, 15 aa, Vigna radiata
NFLAGEKDNVISEIP

SEQ ID NO: 3095 - protein, 15 aa, Vigna radiata
EITPEKNPQLRDLDM

SEQ ID NO: 3096 - protein, 15 aa, Vigna radiata
PNTLLLPHHADADFL

SEQ ID NO: 3097 - protein, 15 aa, Vigna radiata
NTLLLPHHADADFLL

SEQ ID NO: 3098 - protein, 15 aa, Vigna radiata
FEITPEKNPQLRDLD

SEQ ID NO: 3099 - protein, 15 aa, Vigna radiata
AFGINAENNQRNFLA

SEQ ID NO: 3100 - protein, 15 aa, Vigna radiata
FLAGEKDNVISEIPT

SEQ ID NO: 3101 - protein, 15 aa, Anacardium occidentale
KASKEQIRAMSRRGE

SEQ ID NO: 3102 - protein, 15 aa, Anacardium occidentale
PSHMDADSIFFVSWG

SEQ ID NO: 3103 - protein, 15 aa, Anacardium occidentale
GHPFATVASGNENLE

SEQ ID NO: 3104 - protein, 15 aa, Anacardium occidentale
KVFGKQDEEFFFQGP

SEQ ID NO: 3105 - protein, 15 aa, Anacardium occidentale
FFVSWGRGTITKILE

SEQ ID NO: 3106 - protein, 15 aa, Anacardium occidentale
AGHPFATVASGNENL

SEQ ID NO: 3107 - protein, 15 aa, Anacardium occidentale
LPGHFEVFHGPGGEN

SEQ ID NO: 3108 - protein, 15 aa, Anacardium occidentale
ECEKYYKEKKGRERE

SEQ ID NO: 3109 - protein, 15 aa, Anacardium occidentale
WGQRDNGIEETICTM

SEQ ID NO: 3110 - protein, 15 aa, Anacardium occidentale
SVLGGMPEEVLANAF

SEQ ID NO: 3111 - protein, 15 aa, Anacardium occidentale
WISFKTNDRAMTSPL

SEQ ID NO: 3112 - protein, 15 aa, Anacardium occidentale
MLVVPQNFAVVKRAR

SEQ ID NO: 3113 - protein, 15 aa, Anacardium occidentale
LNLPILKWLQLSVEK

SEQ ID NO: 3114 - protein, 15 aa, Anacardium occidentale
RFEWISFKTNDRAMT

SEQ ID NO: 3115 - protein, 15 aa, Anacardium occidentale
FQDRHQKIRRFRRGD

SEQ ID NO: 3116 - protein, 15 aa, Anacardium occidentale
QDRHQKIRRFRRGDI

SEQ ID NO: 3117 - protein, 15 aa, Anacardium occidentale
ISFKTNDRAMTSPLA

SEQ ID NO: 3118 - protein, 15 aa, Anacardium occidentale
MTSPLAGRTSVLGGM

SEQ ID NO: 3119 - protein, 15 aa, Anacardium occidentale
RDNGIEETICTMRLK

SEQ ID NO: 3120 - protein, 15 aa, Arachis hypogaea
VEIKEGALMLPHFNS

SEQ ID NO: 3121 - protein, 15 aa, Arachis hypogaea
IMPAAHPVAINASSE

SEQ ID NO: 3122 - protein, 15 aa, Arachis hypogaea
YILNRHDNQNLRVAK

SEQ ID NO: 3123 - protein, 15 aa, Arachis hypogaea
LGFGINAENNHRIFL

SEQ ID NO: 3124 - protein, 15 aa, Arachis hypogaea
ASSELHLLGFGINAE

SEQ ID NO: 3125 - protein, 15 aa, Arachis hypogaea
LLGFGINAENNHRIF

SEQ ID NO: 3126 - protein, 15 aa, Arachis hypogaea
SSYLQGFSRNTLEAA

SEQ ID NO: 3127 - protein, 15 aa, Arachis hypogaea
AHPVAINASSELHLL

SEQ ID NO: 3128 - protein, 15 aa, Arachis hypogaea
NQLDQFPRRFNLAGN

SEQ ID NO: 3129 - protein, 15 aa, Arachis hypogaea
NGIEETICTACVKKN

SEQ ID NO: 3130 - protein, 15 aa, Arachis hypogaea
FLRYQQQSRQSRRRS

SEQ ID NO: 3131 - protein, 15 aa, Arachis hypogaea
EYVAFKTDSRPSIAN

SEQ ID NO: 3132 - protein, 15 aa, Arachis hypogaea
VAFWLYNDHDTDVVA

SEQ ID NO: 3133 - protein, 15 aa, Arachis hypogaea
SEEEGAIVTVRGGLR

SEQ ID NO: 3134 - protein, 15 aa, Arachis hypogaea
ALRGRAHVQVVDSNG

SEQ ID NO: 3135 - protein, 15 aa, Arachis hypogaea
SAEYGNLYRNALFVP

SEQ ID NO: 3136 - protein, 15 aa, Arachis hypogaea
LTDTNNNDNQLDQFP

SEQ ID NO: 3137 - protein, 15 aa, Arachis hypogaea
NFAVAGKSQSENFEY

SEQ ID NO: 3138 - protein, 15 aa, Bertholletia excelsa
GCPETFQSMSQFQGS

SEQ ID NO: 3139 - protein, 15 aa, Bertholletia excelsa
PVGVLANAYRLSQEE

SEQ ID NO: 3140 - protein, 15 aa, Bertholletia excelsa
PRAGRLTTVNSLKVP

SEQ ID NO: 3141 - protein, 15 aa, Bertholletia excelsa
PRHFFLAGNIQRSQK

SEQ ID NO: 3142 - protein, 15 aa, Carya illinoinensis
VGFGINGKNNQRNFL

SEQ ID NO: 3143 - protein, 15 aa, Carya illinoinensis
GKNNQRNFLAGQNNI

SEQ ID NO: 3144 - protein, 15 aa, Carya illinoinensis
IPAGHPIAITASQNE

SEQ ID NO: 3145 - protein, 15 aa, Carya illinoinensis
GFGINGKNNQRNFLA

SEQ ID NO: 3146 - protein, 15 aa, Carya illinoinensis
TICTLSLRENIGDPS

SEQ ID NO: 3147 - protein, 15 aa, Carya illinoinensis
NGLEETICTLSLREN

SEQ ID NO: 3148 - protein, 15 aa, Carya illinoinensis
LEETICTLSLRENIG

SEQ ID NO: 3149 - protein, 15 aa, Carya illinoinensis
CTLSLRENIGDPSRA

SEQ ID NO: 3150 - protein, 15 aa, Carya illinoinensis
SVVYALRGRAEVQVV

SEQ ID NO: 3151 - protein, 15 aa, Carya illinoinensis
IRALPEEVLVNAFQI

SEQ ID NO: 3152 - protein, 15 aa, Carya illinoinensis
LPEEVLVNAFQIPRE

SEQ ID NO: 3153 - protein, 15 aa, Carya illinoinensis
LPHYSNAPQLVYIAR

SEQ ID NO: 3154 - protein, 15 aa, Carya illinoinensis
LDALEPTNRIEAEAG

SEQ ID NO: 3155 - protein, 15 aa, Carya illinoinensis
EGQLLTIPQNFAVVK

SEQ ID NO: 3156 - protein, 15 aa, Carya illinoinensis
GNNVFSGFDAEFLAD

SEQ ID NO: 3157 - protein, 15 aa, Carya illinoinensis
LGNNVFSGFDAEFLA

SEQ ID NO: 3158 - protein, 15 aa, Carya illinoinensis
VVYALRGRAEVQVVD

SEQ ID NO: 3159 - protein, 15 aa, Carya illinoinensis
NFYLAGNPDDEFRPQ

SEQ ID NO: 3160 - protein, 15 aa, Carya illinoinensis
DALYVPHWNLNAHSV

SEQ ID NO: 3161 - protein, 15 aa, Carya illinoinensis
THNNANQLDQNPRNF

SEQ ID NO: 3162 - protein, 15 aa, Carya illinoinensis
IESWDPNHQQLQCAG

SEQ ID NO: 3163 - protein, 15 aa, Carya illinoinensis
LLDTHNNANQLDQNP

SEQ ID NO: 3164 - protein, 15 aa, Carya illinoinensis
REGQLLTIPQNFAVV

SEQ ID NO: 3165 - protein, 15 aa, Carya illinoinensis
LREGQLLTIPQNFAV

SEQ ID NO: 3166 - protein, 15 aa, Carya illinoinensis
SAIRALPEEVLVNAF

SEQ ID NO: 3167 - protein, 15 aa, Carya illinoinensis
DALEPTNRIEAEAGV

SEQ ID NO: 3168 - protein, 15 aa, Carya illinoinensis
NPRNFYLAGNPDDEF

SEQ ID NO: 3169 - protein, 15 aa, Carya illinoinensis
EETICTLSLRENIGD

SEQ ID NO: 3170 - protein, 15 aa, Carya illinoinensis
SWDPNHQQLQCAGVA

SEQ ID NO: 3171 - protein, 15 aa, Carya illinoinensis
ITGVLFPGCPETFEE

SEQ ID NO: 3172 - protein, 15 aa, Carya illinoinensis
ESWDPNHQQLQCAGV

SEQ ID NO: 3173 - protein, 15 aa, Carya illinoinensis
RLDALEPTNRIEAEA

SEQ ID NO: 3174 - protein, 15 aa, Carya illinoinensis
YVPHWNLNAHSVVYA

SEQ ID NO: 3175 - protein, 15 aa, Carya illinoinensis
VVAIFLLDTHNNANQ

SEQ ID NO: 3176 - protein, 15 aa, Carya illinoinensis
GRGITGVLFPGCPET

SEQ ID NO: 3177 - protein, 15 aa, Carya illinoinensis
RNFYLAGNPDDEFRP

SEQ ID NO: 3178 - protein, 15 aa, Carya illinoinensis
TSAIRALPEEVLVNA

SEQ ID NO: 3179 - protein, 15 aa, Carya illinoinensis
EFQQDRHQKIRHFRE

SEQ ID NO: 3180 - protein, 15 aa, Carya illinoinensis
NANQLDQNPRNFYLA

SEQ ID NO: 3181 - protein, 15 aa, Carya illinoinensis
HFREGDIIAFPAGVA

SEQ ID NO: 3182 - protein, 15 aa, Carya illinoinensis
GLEETICTLSLRENI

SEQ ID NO: 3183 - protein, 15 aa, Carya illinoinensis
ALRGRAEVQVVDNFG

SEQ ID NO: 3184 - protein, 15 aa, Carya illinoinensis
NNVFSGFDAEFLADA

SEQ ID NO: 3185 - protein, 15 aa, Carya illinoinensis
HSVVYALRGRAEVQV

SEQ ID NO: 3186 - protein, 15 aa, Corylus avellana
RGVVFVAPAGHPVAV

SEQ ID NO: 3187 - protein, 15 aa, Corylus avellana
SVVYAIRGRARVQVV

SEQ ID NO: 3188 - protein, 15 aa, Corylus avellana
AHSVVYAIRGRARVQ

SEQ ID NO: 3189 - protein, 15 aa, Corylus avellana
TSAIRALPDDVLANA

SEQ ID NO: 3190 - protein, 15 aa, Corylus avellana
ITGVLFPGCPETFED

SEQ ID NO: 3191 - protein, 15 aa, Corylus avellana
QGQVLTIPQNFAVAK

SEQ ID NO: 3192 - protein, 15 aa, Corylus avellana
RSEQDRHQKIRHFRE

SEQ ID NO: 3193 - protein, 15 aa, Corylus avellana
GNNVFSGFDAEFLAD

SEQ ID NO: 3194 - protein, 15 aa, Corylus avellana
RHFYLAGNPDDEHQR

SEQ ID NO: 3195 - protein, 15 aa, Corylus avellana
FEETICSLRLRENIC

SEQ ID NO: 3196 - protein, 15 aa, Corylus avellana
SWDHNDQQFQCAGVA

SEQ ID NO: 3197 - protein, 15 aa, Corylus avellana
GFEETICSLRLRENI

SEQ ID NO: 3198 - protein, 15 aa, Corylus avellana
LRQGQVLTIPQNFAV

SEQ ID NO: 3199 - protein, 15 aa, Corylus avellana
EGNNVFSGFDAEFLA

SEQ ID NO: 3200 - protein, 15 aa, Corylus avellana
RQGQVLTIPQNFAVA

SEQ ID NO: 3201 - protein, 15 aa, Corylus avellana
RGRGITGVLFPGCPE

SEQ ID NO: 3202 - protein, 15 aa, Corylus avellana
LNALEPTNRIEAEAC

SEQ ID NO: 3203 - protein, 15 aa, Corylus avellana
RLNALEPTNRIEAEA

SEQ ID NO: 3204 - protein, 15 aa, Corylus avellana
SAIRALPDDVLANAF

SEQ ID NO: 3205 - protein, 15 aa, Corylus avellana
ESWDHNDQQFQCAGV

SEQ ID NO: 3206 - protein, 15 aa, Corylus avellana
NVFSGFDAEFLADAF

SEQ ID NO: 3207 - protein, 15 aa, Corylus avellana
GQVLTIPQNFAVAKR

SEQ ID NO: 3208 - protein, 15 aa, Corylus avellana
INTVNSNTLPVLRWL

SEQ ID NO: 3209 - protein, 15 aa, Corylus avellana
HFREGDIIALPAGVA

SEQ ID NO: 3210 - protein, 15 aa, Corylus avellana
YVPHWNLNAHSVVYA

SEQ ID NO: 3211 - protein, 15 aa, Corylus avellana
NPRHFYLAGNPDDEH

SEQ ID NO: 3212 - protein, 15 aa, Corylus avellana
NALEPTNRIEAEACQ

SEQ ID NO: 3213 - protein, 15 aa, Corylus avellana
VVYAIRGRARVQVVD

SEQ ID NO: 3214 - protein, 15 aa, Corylus avellana
HSVVYAIRGRARVQV

SEQ ID NO: 3215 - protein, 15 aa, Corylus avellana
HFYLAGNPDDEHQRQ

SEQ ID NO: 3216 - protein, 15 aa, Corylus avellana
GRINTVNSNTLPVLR

SEQ ID NO: 3217 - protein, 15 aa, Corylus avellana
NNVFSGFDAEFLADA

SEQ ID NO: 3218 - protein, 15 aa, Fagopyrum esculentum
GQILVVPQGFAVVLK

SEQ ID NO: 3219 - protein, 15 aa, Fagopyrum esculentum
SVLRAIPVEVLANSY

SEQ ID NO: 3220 - protein, 15 aa, Fagopyrum esculentum
VNSNNLPILEFIQLS

SEQ ID NO: 3221 - protein, 15 aa, Fagopyrum esculentum
SRADVFNPRAGRINT

SEQ ID NO: 3222 - protein, 15 aa, Fagopyrum esculentum
GCPETFQSESEFEYP

SEQ ID NO: 3223 - protein, 15 aa, Fagopyrum esculentum
LANSYDISTKEAFRL

SEQ ID NO: 3224 - protein, 15 aa, Fagopyrum esculentum
ISTKEAFRLKNGRQE

SEQ ID NO: 3225 - protein, 15 aa, Fagopyrum esculentum
RGQILVVPQGFAVVL

SEQ ID NO: 3226 - protein, 15 aa, Fagopyrum esculentum
PRAGRINTVNSNNLP

SEQ ID NO: 3227 - protein, 15 aa, Fagopyrum esculentum
VVLYKNAILGPRWNL

SEQ ID NO: 3228 - protein, 15 aa, Fagopyrum esculentum
INTVNSNNLPILEFI

SEQ ID NO: 3229 - protein, 15 aa, Fagopyrum tataricum
GQILVVPQGFAVVLK

SEQ ID NO: 3230 - protein, 15 aa, Fagopyrum tataricum
SVLRAIPVEVLANSY

SEQ ID NO: 3231 - protein, 15 aa, Fagopyrum tataricum
VNSNNLPILEFIQLS

SEQ ID NO: 3232 - protein, 15 aa, Fagopyrum tataricum
SRADVFNPRAGRINT

SEQ ID NO: 3233 - protein, 15 aa, Fagopyrum tataricum
GCPETFQSESEFEYP

SEQ ID NO: 3234 - protein, 15 aa, Fagopyrum tataricum
LANSYDISTKEAFRL

SEQ ID NO: 3235 - protein, 15 aa, Fagopyrum tataricum
ISTKEAFRLKNGRQE

SEQ ID NO: 3236 - protein, 15 aa, Fagopyrum tataricum
RGQILVVPQGFAVVL

SEQ ID NO: 3237 - protein, 15 aa, Fagopyrum tataricum
PRAGRINTVNSNNLP

SEQ ID NO: 3238 - protein, 15 aa, Fagopyrum tataricum
VVLYKNAILGPRWNL

SEQ ID NO: 3239 - protein, 15 aa, Fagopyrum tataricum
INTVNSNNLPILEFI

SEQ ID NO: 3240 - protein, 15 aa, Glycine max
FAIGINAENNQRNFL

SEQ ID NO: 3241 - protein, 15 aa, Glycine max
FFEITPEKNPQLRDL

SEQ ID NO: 3242 - protein, 15 aa, Glycine max
YLQGFSRNILEASYD

SEQ ID NO: 3243 - protein, 15 aa, Glycine max
NKLGKFFEITPEKNP

SEQ ID NO: 3244 - protein, 15 aa, Glycine max
NEGALLLPHFNSKAI

SEQ ID NO: 3245 - protein, 15 aa, Glycine max
SNKLGKFFEITPEKN

SEQ ID NO: 3246 - protein, 15 aa, Glycine max
QSYLQGFSRNILEAS

SEQ ID NO: 3247 - protein, 15 aa, Glycine max
IPVNKPGRFESFFLS

SEQ ID NO: 3248 - protein, 15 aa, Glycine max
KPNTLLLPNHADADY

SEQ ID NO: 3249 - protein, 15 aa, Glycine max
SYLQGFSRNILEASY

SEQ ID NO: 3250 - protein, 15 aa, Glycine max
EPVVAISLLDTSNFN

SEQ ID NO: 3251 - protein, 15 aa, Glycine max
AQYVVLYKNGIYSPH

SEQ ID NO: 3252 - protein, 15 aa, Glycine max
WNLNANSVIYVTRGQ

SEQ ID NO: 3253 - protein, 15 aa, Glycine max
NNQLDQTPRVFYLAG

SEQ ID NO: 3254 - protein, 15 aa, Glycine max
ERKQIVTVEGGLSVI

SEQ ID NO: 3255 - protein, 15 aa, Glycine max
LLVVPQNFVVAEQAG

SEQ ID NO: 3256 - protein, 15 aa, Glycine max
GVEENICTLKLHENI

SEQ ID NO: 3257 - protein, 15 aa, Glycine max
NQLDQTPRVFYLAGN

SEQ ID NO: 3258 - protein, 15 aa, Glycine max
DVFRAIPSEVLAHSY

SEQ ID NO: 3259 - protein, 15 aa, Juglans nigra
IESWDPNNQQFQCAG

SEQ ID NO: 3260 - protein, 15 aa, Juglans nigra
KGRGITGVLFPGCPE

SEQ ID NO: 3261 - protein, 15 aa, Juglans nigra
IRALPEEVLANALQI

SEQ ID NO: 3262 - protein, 15 aa, Juglans nigra
LEETICTLRLRENIG

SEQ ID NO: 3263 - protein, 15 aa, Juglans nigra
SVVYALRGRAEVQVV

SEQ ID NO: 3264 - protein, 15 aa, Juglans nigra
SAIRALPEEVLANAL

SEQ ID NO: 3265 - protein, 15 aa, Juglans nigra
EGQLLTIPQNFAVVK

SEQ ID NO: 3266 - protein, 15 aa, Juglans nigra
GLEETICTLRLRENI

SEQ ID NO: 3267 - protein, 15 aa, Juglans nigra
ESWDPNNQQFQCAGV

SEQ ID NO: 3268 - protein, 15 aa, Juglans nigra
VVYALRGRAEVQVVD

SEQ ID NO: 3269 - protein, 15 aa, Juglans nigra
NFYLAGNPDDEFRPQ

SEQ ID NO: 3270 - protein, 15 aa, Juglans nigra
DALYVPHWNLNAHSV

SEQ ID NO: 3271 - protein, 15 aa, Juglans nigra
SGNNVFSGFDADFLA

SEQ ID NO: 3272 - protein, 15 aa, Juglans nigra
NNVFSGFDADFLADA

SEQ ID NO: 3273 - protein, 15 aa, Juglans nigra
REGQLLTIPQNFAVV

SEQ ID NO: 3274 - protein, 15 aa, Juglans nigra
LREGQLLTIPQNFAV

SEQ ID NO: 3275 - protein, 15 aa, Juglans nigra
LPEEVLANALQIPRE

SEQ ID NO: 3276 - protein, 15 aa, Juglans nigra
VALEPSNRIEAEAGV

SEQ ID NO: 3277 - protein, 15 aa, Juglans nigra
TTNNANQLDQNPRNF

SEQ ID NO: 3278 - protein, 15 aa, Juglans nigra
NPRNFYLAGNPDDEF

SEQ ID NO: 3279 - protein, 15 aa, Juglans nigra
CTLRLRENIGDPSRA

SEQ ID NO: 3280 - protein, 15 aa, Juglans nigra
ITGVLFPGCPETFEE

SEQ ID NO: 3281 - protein, 15 aa, Juglans nigra
SWDPNNQQFQCAGVA

SEQ ID NO: 3282 - protein, 15 aa, Juglans nigra
TSAIRALPEEVLANA

SEQ ID NO: 3283 - protein, 15 aa, Juglans nigra
FQRDRHQKIRHFREG

SEQ ID NO: 3284 - protein, 15 aa, Juglans nigra
LPQYSNAPQLLYIVK

SEQ ID NO: 3285 - protein, 15 aa, Juglans nigra
YVPHWNLNAHSVVYA

SEQ ID NO: 3286 - protein, 15 aa, Juglans nigra
GRGITGVLFPGCPET

SEQ ID NO: 3287 - protein, 15 aa, Juglans nigra
RNFYLAGNPDDEFRP

SEQ ID NO: 3288 - protein, 15 aa, Juglans nigra
HFREGDVIAFPAGVA

SEQ ID NO: 3289 - protein, 15 aa, Juglans nigra
NANQLDQNPRNFYLA

SEQ ID NO: 3290 - protein, 15 aa, Juglans nigra
ALRGRAEVQVVDNFG

SEQ ID NO: 3291 - protein, 15 aa, Juglans nigra
TICTLRLRENIGDPS

SEQ ID NO: 3292 - protein, 15 aa, Juglans nigra
LVALEPSNRIEAEAG

SEQ ID NO: 3293 - protein, 15 aa, Juglans nigra
HSVVYALRGRAEVQV

SEQ ID NO: 3294 - protein, 15 aa, Juglans regia
GENNQRDFLAGQNNI

SEQ ID NO: 3295 - protein, 15 aa, Juglans regia
IPAGHPIAITASQNE

SEQ ID NO: 3296 - protein, 15 aa, Juglans regia
IESWDPNNQQFQCAG

SEQ ID NO: 3297 - protein, 15 aa, Juglans regia
LPQYSNAPQLVYIAR

SEQ ID NO: 3298 - protein, 15 aa, Juglans regia
LEETICTLRLRENIG

SEQ ID NO: 3299 - protein, 15 aa, Juglans regia
SVVYALRGRAEVQVV

SEQ ID NO: 3300 - protein, 15 aa, Juglans regia
LLDTNNNANQLDQNP

SEQ ID NO: 3301 - protein, 15 aa, Juglans regia
LDALEPTNRIEAEAG

SEQ ID NO: 3302 - protein, 15 aa, Juglans regia
EGQLLTIPQNFAVVK

SEQ ID NO: 3303 - protein, 15 aa, Juglans regia
GLEETICTLRLRENI

SEQ ID NO: 3304 - protein, 15 aa, Juglans regia
ESWDPNNQQFQCAGV

SEQ ID NO: 3305 - protein, 15 aa, Juglans regia
VVYALRGRAEVQVVD

SEQ ID NO: 3306 - protein, 15 aa, Juglans regia
NFYLAGNPDDEFRPQ

SEQ ID NO: 3307 - protein, 15 aa, Juglans regia
DALYVPHWNLNAHSV

SEQ ID NO: 3308 - protein, 15 aa, Juglans regia
NNVFSGFDADFLADA

SEQ ID NO: 3309 - protein, 15 aa, Juglans regia
LGNNVFSGFDADFLA

SEQ ID NO: 3310 - protein, 15 aa, Juglans regia
IRALPEEVLATAFQI

SEQ ID NO: 3311 - protein, 15 aa, Juglans regia
REGQLLTIPQNFAVV

SEQ ID NO: 3312 - protein, 15 aa, Juglans regia
LREGQLLTIPQNFAV

SEQ ID NO: 3313 - protein, 15 aa, Juglans regia
STVNSHTLPVLRWLQ

SEQ ID NO: 3314 - protein, 15 aa, Juglans regia
TNNNANQLDQNPRNF

SEQ ID NO: 3315 - protein, 15 aa, Juglans regia
LPEEVLATAFQIPRE

SEQ ID NO: 3316 - protein, 15 aa, Juglans regia
DALEPTNRIEAEAGV

SEQ ID NO: 3317 - protein, 15 aa, Juglans regia
NPRNFYLAGNPDDEF

SEQ ID NO: 3318 - protein, 15 aa, Juglans regia
CTLRLRENIGDPSRA

SEQ ID NO: 3319 - protein, 15 aa, Juglans regia
ITGVLFPGCPETFEE

SEQ ID NO: 3320 - protein, 15 aa, Juglans regia
SWDPNNQQFQCAGVA

SEQ ID NO: 3321 - protein, 15 aa, Juglans regia
TSAIRALPEEVLATA

SEQ ID NO: 3322 - protein, 15 aa, Juglans regia
TVNSHTLPVLRWLQL

SEQ ID NO: 3323 - protein, 15 aa, Juglans regia
GNNVFSGFDADFLAD

SEQ ID NO: 3324 - protein, 15 aa, Juglans regia
RLDALEPTNRIEAEA

SEQ ID NO: 3325 - protein, 15 aa, Juglans regia
YVPHWNLNAHSVVYA

SEQ ID NO: 3326 - protein, 15 aa, Juglans regia
GRGITGVLFPGCPET

SEQ ID NO: 3327 - protein, 15 aa, Juglans regia
RNFYLAGNPDDEFRP

SEQ ID NO: 3328 - protein, 15 aa, Juglans regia
EFQQDRHQKIRHFRE

SEQ ID NO: 3329 - protein, 15 aa, Juglans regia
SAIRALPEEVLATAF

SEQ ID NO: 3330 - protein, 15 aa, Juglans regia
NANQLDQNPRNFYLA

SEQ ID NO: 3331 - protein, 15 aa, Juglans regia
HFREGDIIAFPAGVA

SEQ ID NO: 3332 - protein, 15 aa, Juglans regia
ALRGRAEVQVVDNFG

SEQ ID NO: 3333 - protein, 15 aa, Juglans regia
TICTLRLRENIGDPS

SEQ ID NO: 3334 - protein, 15 aa, Juglans regia
HSVVYALRGRAEVQV

SEQ ID NO: 3335 - protein, 15 aa, Lens culinaris
NKFGKFFEITPEKNP

SEQ ID NO: 3336 - protein, 15 aa, Lens culinaris
VIVKVSREQIEELSK

SEQ ID NO: 3337 - protein, 15 aa, Lens culinaris
PGDVLVIPAGHPVAI

SEQ ID NO: 3338 - protein, 15 aa, Lens culinaris
FFEITPEKNPQLQDL

SEQ ID NO: 3339 - protein, 15 aa, Lens culinaris
SNKFGKFFEITPEKN

SEQ ID NO: 3340 - protein, 15 aa, Lupinus albus
PKHSDADYVLVVLNG

SEQ ID NO: 3341 - protein, 15 aa, Lupinus albus
KPNTLILPKHSDADY

SEQ ID NO: 3342 - protein, 15 aa, Lupinus albus
LAGSEDNVIRQLDRE

SEQ ID NO: 3343 - protein, 15 aa, Lupinus albus
FLAGSEDNVIRQLDR

SEQ ID NO: 3344 - protein, 15 aa, Lupinus albus
NEGALLLPHYNSKAI

SEQ ID NO: 3345 - protein, 15 aa, Lupinus albus
ASSNLRLLGFGINAY

SEQ ID NO: 3346 - protein, 15 aa, Lupinus albus
QSKPNTLILPKHSDA

SEQ ID NO: 3347 - protein, 15 aa, Lupinus albus
VRVSREQIQELTKYA

SEQ ID NO: 3348 - protein, 15 aa, Lupinus albus
INEGALLLPHYNSKA

SEQ ID NO: 3349 - protein, 15 aa, Lupinus angustifolius
PKHSDADYILVVLNG

SEQ ID NO: 3350 - protein, 15 aa, Lupinus angustifolius
QSNPNTLILPKHSDA

SEQ ID NO: 3351 - protein, 15 aa, Lupinus angustifolius
NPNTLILPKHSDADY

SEQ ID NO: 3352 - protein, 15 aa, Lupinus angustifolius
ERNPQVQDLDISLTF

SEQ ID NO: 3353 - protein, 15 aa, Lupinus angustifolius
NEGALLLPHYNSKAI

SEQ ID NO: 3354 - protein, 15 aa, Lupinus angustifolius
YILNPDDNQNLRVVK

SEQ ID NO: 3355 - protein, 15 aa, Lupinus angustifolius
ASSNLRLLGFGINAN

SEQ ID NO: 3356 - protein, 15 aa, Lupinus angustifolius
INEGALLLPHYNSKA

SEQ ID NO: 3357 - protein, 15 aa, Pinus koraiensis
EGRIEMACPHLGQEH

SEQ ID NO: 3358 - protein, 15 aa, Pinus koraiensis
EEQIREMMRRGGFSA

SEQ ID NO: 3359 - protein, 15 aa, Pisum sativum
VIVKVSREQIEELSK

SEQ ID NO: 3360 - protein, 15 aa, Pisum sativum
PGDVFVIPAGHPVAI

SEQ ID NO: 3361 - protein, 15 aa, Pisum sativum
NKFGKFFEITPEKNQ

SEQ ID NO: 3362 - protein, 15 aa, Pisum sativum
ENNERNFLAGEEDNV

SEQ ID NO: 3363 - protein, 15 aa, Pisum sativum
SNKFGKFFEITPEKN

SEQ ID NO: 3364 - protein, 15 aa, Pisum sativum
NLIGFGINAENNERN

SEQ ID NO: 3365 - protein, 15 aa, Pisum sativum
FFEITPEKNQQLQDL

SEQ ID NO: 3366 - protein, 15 aa, Pisum sativum
LIGFGINAENNERNF

SEQ ID NO: 3367 - protein, 15 aa, Pisum sativum
LAGEEDNVISQVERP

SEQ ID NO: 3368 - protein, 15 aa, Pisum sativum
AGEEDNVISQVERPV

SEQ ID NO: 3369 - protein, 15 aa, Pisum sativum
LNLIGFGINAENNER

SEQ ID NO: 3370 - protein, 15 aa, Pisum sativum
IIPAGHPVAITASSN

SEQ ID NO: 3371 - protein, 15 aa, Pisum sativum
NEGALMLPHYNSRAI

SEQ ID NO: 3372 - protein, 15 aa, Pisum sativum
LSGSDDNVISQIENP

SEQ ID NO: 3373 - protein, 15 aa, Pisum sativum
SGSDDNVISQIENPV

SEQ ID NO: 3374 - protein, 15 aa, Pisum sativum
VEINEGALMLPHYNS

SEQ ID NO: 3375 - protein, 15 aa, Pisum sativum
PGDVVIIPAGHPVAI

SEQ ID NO: 3376 - protein, 15 aa, Pisum sativum
LFEITPEKKYPQLQD

SEQ ID NO: 3377 - protein, 15 aa, Pisum sativum
NKFGKLFEITPEKKY

SEQ ID NO: 3378 - protein, 15 aa, Pisum sativum
AIVKVSREQIEELKK

SEQ ID NO: 3379 - protein, 15 aa, Pisum sativum
YSNKFGKLFEITPEK

SEQ ID NO: 3380 - protein, 15 aa, Pisum sativum
NFLSGSDDNVISQIE

SEQ ID NO: 3381 - protein, 15 aa, Pisum sativum
SNKFGKLFEITPEKK

SEQ ID NO: 3382 - protein, 15 aa, Pisum sativum
LLGFGINAENNERNF

SEQ ID NO: 3383 - protein, 15 aa, Pisum sativum
FLSGSDDNVISQIEN

SEQ ID NO: 3384 - protein, 15 aa, Pisum sativum
LNLLGFGINAENNER

SEQ ID NO: 3385 - protein, 15 aa, Pisum sativum
DAIVKVSREQIEELK

SEQ ID NO: 3386 - protein, 15 aa, Pistacia vera
LVVVPQNFAVVKRAS

SEQ ID NO: 3387 - protein, 15 aa, Pistacia vera
GCPETFQEESQSRSR

SEQ ID NO: 3388 - protein, 15 aa, Pistacia vera
ILAPHWNVNAHSIVY

SEQ ID NO: 3389 - protein, 15 aa, Pistacia vera
LPGHYEVFHGPGGEN

SEQ ID NO: 3390 - protein, 15 aa, Pistacia vera
GHPFVTVASGNQNLE

SEQ ID NO: 3391 - protein, 15 aa, Pistacia vera
KASKEQIRAMSRRGE

SEQ ID NO: 3392 - protein, 15 aa, Pistacia vera
AGHPFVTVASGNQNL

SEQ ID NO: 3393 - protein, 15 aa, Pistacia vera
KVFGKQDEEFFFQGP

SEQ ID NO: 3394 - protein, 15 aa, Pistacia vera
FFVSWGRGTITKIRE

SEQ ID NO: 3395 - protein, 15 aa, Pistacia vera
PNHMDADSIFFVSWG

SEQ ID NO: 3396 - protein, 15 aa, Pistacia vera
RRGRDNGLEETICTM

SEQ ID NO: 3397 - protein, 15 aa, Pistacia vera
ISFKTNDRAMISPLA

SEQ ID NO: 3398 - protein, 15 aa, Pistacia vera
LNLPILKWLQLSAER

SEQ ID NO: 3399 - protein, 15 aa, Pistacia vera
MISPLAGSTSVLRAM

SEQ ID NO: 3400 - protein, 15 aa, Pistacia vera
RFEWISFKTNDRAMI

SEQ ID NO: 3401 - protein, 15 aa, Pistacia vera
WISFKTNDRAMISPL

SEQ ID NO: 3402 - protein, 15 aa, Pistacia vera
TSVLRAMPEEVLANA

SEQ ID NO: 3403 - protein, 15 aa, Pistacia vera
SVLRAMPEEVLANAF

SEQ ID NO: 3404 - protein, 15 aa, Pistacia vera
IFVVPQNFAVVKRAR

SEQ ID NO: 3405 - protein, 15 aa, Pistacia vera
QRFEWISFKTNDRAM

SEQ ID NO: 3406 - protein, 15 aa, Prunus Dulcis
GNPERADIFSPRAGR

SEQ ID NO: 3407 - protein, 15 aa, Prunus Dulcis
RNGLHLPSYSNAPQL

SEQ ID NO: 3408 - protein, 15 aa, Prunus Dulcis
RKFYLAGNPENEFNQ

SEQ ID NO: 3409 - protein, 15 aa, Prunus Dulcis
PERADIFSPRAGRIS

SEQ ID NO: 3410 - protein, 15 aa, Prunus Dulcis
NQEDFQCAGVAASRI

SEQ ID NO: 3411 - protein, 15 aa, Sesamum indicum
RLTRGTVVIIPAGHP

SEQ ID NO: 3412 - protein, 15 aa, Sesamum indicum
QNLQVLCFEVNANNN

SEQ ID NO: 3413 - protein, 15 aa, Sesamum indicum
KASEEQVRAMSRHEE

SEQ ID NO: 3414 - protein, 15 aa, Sesamum indicum
GHPFVAVASSNQNLQ

SEQ ID NO: 3415 - protein, 15 aa, Sesamum indicum
AGHPFVAVASSNQNL

SEQ ID NO: 3416 - protein, 15 aa, Sesamum indicum
GNNGFEWVAFKTTGS

SEQ ID NO: 3417 - protein, 15 aa, Sesamum indicum
WISFKTNDNAMTSQL

SEQ ID NO: 3418 - protein, 15 aa, Sinapis alba
ILSGFDPQVLAQALK

SEQ ID NO: 3419 - protein, 15 aa, Sinapis alba
WISFKTNANAMISTL

SEQ ID NO: 3420 - protein, 15 aa, Vigna radiata
AGEKDNVISEIPTEV

SEQ ID NO: 3421 - protein, 15 aa, Vigna radiata
LAGEKDNVISEIPTE

SEQ ID NO: 3422 - protein, 15 aa, Vigna radiata
MSKPNTLLLPHHADA

SEQ ID NO: 3423 - protein, 15 aa, Vigna radiata
SYLQGFSKNILEASF

SEQ ID NO: 3424 - protein, 15 aa, Vigna radiata
FIIPATYPVAINATS

SEQ ID NO: 3425 - protein, 15 aa, Vigna radiata
FAFGINAENNQRNFL

SEQ ID NO: 3426 - protein, 15 aa, Vigna radiata
QSYLQGFSKNILEAS

SEQ ID NO: 3427 - protein, 15 aa, Anacardium occidentale
IFFVSWGRGTITKIL

SEQ ID NO: 3428 - protein, 15 aa, Anacardium occidentale
NPESFYRAFSWEILE

SEQ ID NO: 3429 - protein, 15 aa, Anacardium occidentale
PGHFEVFHGPGGENP

SEQ ID NO: 3430 - protein, 15 aa, Anacardium occidentale
PGGENPESFYRAFSW

SEQ ID NO: 3431 - protein, 15 aa, Anacardium occidentale
EGCVEIACPHLSSSK

SEQ ID NO: 3432 - protein, 15 aa, Anacardium occidentale
PESFYRAFSWEILEA

SEQ ID NO: 3433 - protein, 15 aa, Anacardium occidentale
FLVSVLVLCLGFALA

SEQ ID NO: 3434 - protein, 15 aa, Anacardium occidentale
HFEVFHGPGGENPES

SEQ ID NO: 3435 - protein, 15 aa, Anacardium occidentale
LEAALKTSKDTLEKL

SEQ ID NO: 3436 - protein, 15 aa, Anacardium occidentale
FYRAFSWEILEAALK

SEQ ID NO: 3437 - protein, 15 aa, Anacardium occidentale
QCKHQCKVQRQYDEQ

SEQ ID NO: 3438 - protein, 15 aa, Anacardium occidentale
ENPESFYRAFSWEIL

SEQ ID NO: 3439 - protein, 15 aa, Anacardium occidentale
FEVNAEGNIRYTLAG

SEQ ID NO: 3440 - protein, 15 aa, Anacardium occidentale
ELKQCKHQCKVQRQY

SEQ ID NO: 3441 - protein, 15 aa, Anacardium occidentale
ENLEIVCFEVNAEGN

SEQ ID NO: 3442 - protein, 15 aa, Anacardium occidentale
YRAFSWEILEAALKT

SEQ ID NO: 3443 - protein, 15 aa, Anacardium occidentale
RAFSWEILEAALKTS

SEQ ID NO: 3444 - protein, 15 aa, Anacardium occidentale
QCMRQCERQEGGQQK

SEQ ID NO: 3445 - protein, 15 aa, Anacardium occidentale
ARIRKDTVFIVPAGH

SEQ ID NO: 3446 - protein, 15 aa, Anacardium occidentale
CKHQCKVQRQYDEQQ

SEQ ID NO: 3447 - protein, 15 aa, Anacardium occidentale
HQCKVQRQYDEQQKE

SEQ ID NO: 3448 - protein, 15 aa, Anacardium occidentale
GGENPESFYRAFSWE

SEQ ID NO: 3449 - protein, 15 aa, Anacardium occidentale
TLAGKKNIIKVMEKE

SEQ ID NO: 3450 - protein, 15 aa, Anacardium occidentale
AFSWEILEAALKTSK

SEQ ID NO: 3451 - protein, 15 aa, Anacardium occidentale
FEDEDFTTKVKTEQG

SEQ ID NO: 3452 - protein, 15 aa, Anacardium occidentale
DPELKQCKHQCKVQR

SEQ ID NO: 3453 - protein, 15 aa, Anacardium occidentale
IDPELKQCKHQCKVQ

SEQ ID NO: 3454 - protein, 15 aa, Anacardium occidentale
AKELAFKMEGEEVDK

SEQ ID NO: 3455 - protein, 15 aa, Anacardium occidentale
EVDKVFGKQDEEFFF

SEQ ID NO: 3456 - protein, 15 aa, Anacardium occidentale
RQCERQEGGQQKQLC

SEQ ID NO: 3457 - protein, 15 aa, Anacardium occidentale
GENPESFYRAFSWEI

SEQ ID NO: 3458 - protein, 15 aa, Anacardium occidentale
ASKEQIRAMSRRGEG

SEQ ID NO: 3459 - protein, 15 aa, Anacardium occidentale
ERQEGGQQKQLCRFR

SEQ ID NO: 3460 - protein, 15 aa, Anacardium occidentale
ESFYRAFSWEILEAA

SEQ ID NO: 3461 - protein, 15 aa, Anacardium occidentale
NITKGGMSVPFYNSR

SEQ ID NO: 3462 - protein, 15 aa, Anacardium occidentale
LAGKKNIIKVMEKEA

SEQ ID NO: 3463 - protein, 15 aa, Anacardium occidentale
VASGNENLEIVCFEV

SEQ ID NO: 3464 - protein, 15 aa, Anacardium occidentale
PFATVASGNENLEIV

SEQ ID NO: 3465 - protein, 15 aa, Anacardium occidentale
SFYRAFSWEILEAAL

SEQ ID NO: 3466 - protein, 15 aa, Anacardium occidentale
PYVFEDEDFTTKVKT

SEQ ID NO: 3467 - protein, 15 aa, Anacardium occidentale
PELKQCKHQCKVQRQ

SEQ ID NO: 3468 - protein, 15 aa, Anacardium occidentale
ANITKGGMSVPFYNS

SEQ ID NO: 3469 - protein, 15 aa, Anacardium occidentale
QAFVVPSHMDADSIF

SEQ ID NO: 3470 - protein, 15 aa, Anacardium occidentale
MKASKEQIRAMSRRG

SEQ ID NO: 3471 - protein, 15 aa, Anacardium occidentale
SFSLFLVSVLVLCLG

SEQ ID NO: 3472 - protein, 15 aa, Anacardium occidentale
QCKVQRQYDEQQKEQ

SEQ ID NO: 3473 - protein, 15 aa, Anacardium occidentale
GEGCVEIACPHLSSS

SEQ ID NO: 3474 - protein, 15 aa, Anacardium occidentale
HMDADSIFFVSWGRG

SEQ ID NO: 3475 - protein, 15 aa, Anacardium occidentale
KQCKHQCKVQRQYDE

SEQ ID NO: 3476 - protein, 15 aa, Anacardium occidentale
NRGGIVKVKDDELRV

SEQ ID NO: 3477 - protein, 15 aa, Anacardium occidentale
RKFHLAGNPKDVFQQ

SEQ ID NO: 3478 - protein, 15 aa, Anacardium occidentale
EEVLANAFQISREDA

SEQ ID NO: 3479 - protein, 15 aa, Anacardium occidentale
REERFEWISFKTNDR

SEQ ID NO: 3480 - protein, 15 aa, Anacardium occidentale
PQYSNAPQLIYVVQG

SEQ ID NO: 3481 - protein, 15 aa, Anacardium occidentale
FKTNDRAMTSPLAGR

SEQ ID NO: 3482 - protein, 15 aa, Anacardium occidentale
VPQNFAVVKRAREER

SEQ ID NO: 3483 - protein, 15 aa, Anacardium occidentale
PHWNLNSHSIIYGCK

SEQ ID NO: 3484 - protein, 15 aa, Anacardium occidentale
CQIDRLDALEPDNRV

SEQ ID NO: 3485 - protein, 15 aa, Anacardium occidentale
SFKTNDRAMTSPLAG

SEQ ID NO: 3486 - protein, 15 aa, Arachis hypogaea
NVIDQIEKQAKDLAF

SEQ ID NO: 3487 - protein, 15 aa, Arachis hypogaea
NGNNRKSFNLDEGHA

SEQ ID NO: 3488 - protein, 15 aa, Arachis hypogaea
IEAKPNTLVLPKHAD

SEQ ID NO: 3489 - protein, 15 aa, Arachis hypogaea
ERTRGRQPGDYDDDR

SEQ ID NO: 3490 - protein, 15 aa, Arachis hypogaea
GSEEEGDITNPINLR

SEQ ID NO: 3491 - protein, 15 aa, Arachis hypogaea
VRRYTARLKEGDVFI

SEQ ID NO: 3492 - protein, 15 aa, Arachis hypogaea
PDKKNPQLQDLDMML

SEQ ID NO: 3493 - protein, 15 aa, Arachis hypogaea
KEDQEEENQGGKGPL

SEQ ID NO: 3494 - protein, 15 aa, Arachis hypogaea
TLVLPKHADADNILV

SEQ ID NO: 3495 - protein, 15 aa, Arachis hypogaea
VQIEAKPNTLVLPKH

SEQ ID NO: 3496 - protein, 15 aa, Arachis hypogaea
DSHQKVHRFNEGDLI

SEQ ID NO: 3497 - protein, 15 aa, Arachis hypogaea
RQSRRRSLPYSPYSP

SEQ ID NO: 3498 - protein, 15 aa, Arachis hypogaea
GENSFIDNLPEEVVA

SEQ ID NO: 3499 - protein, 15 aa, Arachis hypogaea
VAVSLTDTNNNDNQL

SEQ ID NO: 3500 - protein, 15 aa, Arachis hypogaea
ESEGGYIETWNPNNQ

SEQ ID NO: 3501 - protein, 15 aa, Arachis hypogaea
PPRRLQEEDQSQQQQ

SEQ ID NO: 3502 - protein, 15 aa, Arachis hypogaea
VRGGLRILSPDGTRG

SEQ ID NO: 3503 - protein, 15 aa, Bertholletia excelsa
DLNQLDQNPRHFFLA

SEQ ID NO: 3504 - protein, 15 aa, Bertholletia excelsa
PLRGIPVGVLANAYR

SEQ ID NO: 3505 - protein, 15 aa, Bertholletia excelsa
NPAEADFYNPRAGRL

SEQ ID NO: 3506 - protein, 15 aa, Bertholletia excelsa
ILTFLQLSAMKGVLY

SEQ ID NO: 3507 - protein, 15 aa, Carya illinoinensis
ERQRRGQEQQLCRRR

SEQ ID NO: 3508 - protein, 15 aa, Carya illinoinensis
CERQRRGQEQQLCRR

SEQ ID NO: 3509 - protein, 15 aa, Carya illinoinensis
QLEREAKELSFNMPR

SEQ ID NO: 3510 - protein, 15 aa, Carya illinoinensis
VNNPGQFREYYAAGA

SEQ ID NO: 3511 - protein, 15 aa, Carya illinoinensis
ANPNTFVLPYHKDAE

SEQ ID NO: 3512 - protein, 15 aa, Carya illinoinensis
MVPHYNSKATVVVYV

SEQ ID NO: 3513 - protein, 15 aa, Carya illinoinensis
EREAKELSFNMPREE

SEQ ID NO: 3514 - protein, 15 aa, Carya illinoinensis
GTGRFEMACPHDVSS

SEQ ID NO: 3515 - protein, 15 aa, Carya illinoinensis
RALPEEVLVNAFQIP

SEQ ID NO: 3516 - protein, 15 aa, Carya illinoinensis
RDEGFEWVSFKTNEN

SEQ ID NO: 3517 - protein, 15 aa, Carya illinoinensis
ARDEGFEWVSFKTNE

SEQ ID NO: 3518 - protein, 15 aa, Carya illinoinensis
AVVKRARDEGFEWVS

SEQ ID NO: 3519 - protein, 15 aa, Carya illinoinensis
LNRLDALEPTNRIEA

SEQ ID NO: 3520 - protein, 15 aa, Carya illinoinensis
AHWCYNDGSSPVVAI

SEQ ID NO: 3521 - protein, 15 aa, Carya illinoinensis
EAEAGVIESWDPNHQ

SEQ ID NO: 3522 - protein, 15 aa, Carya illinoinensis
YALRGRAEVQVVDNF

SEQ ID NO: 3523 - protein, 15 aa, Carya illinoinensis
NRLDALEPTNRIEAE

SEQ ID NO: 3524 - protein, 15 aa, Carya illinoinensis
PNHQQLQCAGVAVVR

SEQ ID NO: 3525 - protein, 15 aa, Carya illinoinensis
ICTLSLRENIGDPSR

SEQ ID NO: 3526 - protein, 15 aa, Carya illinoinensis
STVNSHNLPILRWLQ

SEQ ID NO: 3527 - protein, 15 aa, Carya illinoinensis
GRAEVQVVDNFGQTV

SEQ ID NO: 3528 - protein, 15 aa, Carya illinoinensis
PHYSNAPQLVYIARG

SEQ ID NO: 3529 - protein, 15 aa, Carya illinoinensis
LRGRAEVQVVDNFGQ

SEQ ID NO: 3530 - protein, 15 aa, Carya illinoinensis
RGRAEVQVVDNFGQT

SEQ ID NO: 3531 - protein, 15 aa, Carya illinoinensis
HNNANQLDQNPRNFY

SEQ ID NO: 3532 - protein, 15 aa, Carya illinoinensis
AEAGVIESWDPNHQQ

SEQ ID NO: 3533 - protein, 15 aa, Carya illinoinensis
WVSFKTNENAMVSPL

SEQ ID NO: 3534 - protein, 15 aa, Carya illinoinensis
FEWVSFKTNENAMVS

SEQ ID NO: 3535 - protein, 15 aa, Carya illinoinensis
NNANQLDQNPRNFYL

SEQ ID NO: 3536 - protein, 15 aa, Carya illinoinensis
PEEVLVNAFQIPRED

SEQ ID NO: 3537 - protein, 15 aa, Carya illinoinensis
RAEVQVVDNFGQTVF

SEQ ID NO: 3538 - protein, 15 aa, Carya illinoinensis
AIRALPEEVLVNAFQ

SEQ ID NO: 3539 - protein, 15 aa, Carya illinoinensis
YLAGNPDDEFRPQGQ

SEQ ID NO: 3540 - protein, 15 aa, Carya illinoinensis
FYLAGNPDDEFRPQG

SEQ ID NO: 3541 - protein, 15 aa, Carya illinoinensis
AGVIESWDPNHQQLQ

SEQ ID NO: 3542 - protein, 15 aa, Corylus avellana
NPYVFQDEHFESRVK

SEQ ID NO: 3543 - protein, 15 aa, Corylus avellana
FYRAFSWEVLEAALK

SEQ ID NO: 3544 - protein, 15 aa, Corylus avellana
EDPESFYRAFSWEVL

SEQ ID NO: 3545 - protein, 15 aa, Corylus avellana
VSAPGHFEAFYGAGG

SEQ ID NO: 3546 - protein, 15 aa, Corylus avellana
ESFYRAFSWEVLEAA

SEQ ID NO: 3547 - protein, 15 aa, Corylus avellana
AFSWEVLEAALKVRR

SEQ ID NO: 3548 - protein, 15 aa, Corylus avellana
GEDPESFYRAFSWEV

SEQ ID NO: 3549 - protein, 15 aa, Corylus avellana
GEGFFEMACPHLSSS

SEQ ID NO: 3550 - protein, 15 aa, Corylus avellana
EAFYGAGGEDPESFY

SEQ ID NO: 3551 - protein, 15 aa, Corylus avellana
DPESFYRAFSWEVLE

SEQ ID NO: 3552 - protein, 15 aa, Corylus avellana
GGEDPESFYRAFSWE

SEQ ID NO: 3553 - protein, 15 aa, Corylus avellana
PESFYRAFSWEVLEA

SEQ ID NO: 3554 - protein, 15 aa, Corylus avellana
GVVFVAPAGHPVAVI

SEQ ID NO: 3555 - protein, 15 aa, Corylus avellana
YRAFSWEVLEAALKV

SEQ ID NO: 3556 - protein, 15 aa, Corylus avellana
AGGEDPESFYRAFSW

SEQ ID NO: 3557 - protein, 15 aa, Corylus avellana
SFYRAFSWEVLEAAL

SEQ ID NO: 3558 - protein, 15 aa, Corylus avellana
LQPVSAPGHFEAFYG

SEQ ID NO: 3559 - protein, 15 aa, Corylus avellana
RAFSWEVLEAALKVR

SEQ ID NO: 3560 - protein, 15 aa, Corylus avellana
MAGPYYNSRATKISV

SEQ ID NO: 3561 - protein, 15 aa, Corylus avellana
FEVNAHGNSRFPLAG

SEQ ID NO: 3562 - protein, 15 aa, Corylus avellana
QVLCFEVNAHGNSRF

SEQ ID NO: 3563 - protein, 15 aa, Corylus avellana
VLCFEVNAHGNSRFP

SEQ ID NO: 3564 - protein, 15 aa, Corylus avellana
PKEDPELKKCKHKCR

SEQ ID NO: 3565 - protein, 15 aa, Corylus avellana
PQYSNAPELIYIERG

SEQ ID NO: 3566 - protein, 15 aa, Corylus avellana
ALPDDVLANAFQISR

SEQ ID NO: 3567 - protein, 15 aa, Corylus avellana
NGFEETICSLRLREN

SEQ ID NO: 3568 - protein, 15 aa, Corylus avellana
KRAESEGFEWVAFKT

SEQ ID NO: 3569 - protein, 15 aa, Corylus avellana
YANQLDENPRHFYLA

SEQ ID NO: 3570 - protein, 15 aa, Corylus avellana
TVNSNTLPVLRWLQL

SEQ ID NO: 3571 - protein, 15 aa, Corylus avellana
EGFEWVAFKTNDNAQ

SEQ ID NO: 3572 - protein, 15 aa, Corylus avellana
EWVAFKTNDNAQISP

SEQ ID NO: 3573 - protein, 15 aa, Corylus avellana
AHWCYNDGDSPVVTV

SEQ ID NO: 3574 - protein, 15 aa, Corylus avellana
DRLNALEPTNRIEAE

SEQ ID NO: 3575 - protein, 15 aa, Fagopyrum esculentum
VEVFLPFQSRDEKER

SEQ ID NO: 3576 - protein, 15 aa, Fagopyrum esculentum
QHVVLYKNAILGPRW

SEQ ID NO: 3577 - protein, 15 aa, Fagopyrum esculentum
EVEVFLPFQSRDEKE

SEQ ID NO: 3578 - protein, 15 aa, Fagopyrum esculentum
AFRLKNGRQEVEVFL

SEQ ID NO: 3579 - protein, 15 aa, Fagopyrum esculentum
EVFLPFQSRDEKERE

SEQ ID NO: 3580 - protein, 15 aa, Fagopyrum esculentum
VQRGQILVVPQGFAV

SEQ ID NO: 3581 - protein, 15 aa, Fagopyrum esculentum
QLSAQHVVLYKNAIL

SEQ ID NO: 3582 - protein, 15 aa, Fagopyrum esculentum
VQVVGDEGRSVFDDN

SEQ ID NO: 3583 - protein, 15 aa, Fagopyrum esculentum
YVTRGEGRVQVVGDE

SEQ ID NO: 3584 - protein, 15 aa, Fagopyrum esculentum
VGDEGRSVFDDNVQR

SEQ ID NO: 3585 - protein, 15 aa, Fagopyrum esculentum
GKTSVLRAIPVEVLA

SEQ ID NO: 3586 - protein, 15 aa, Fagopyrum esculentum
PIAGKTSVLRAIPVE

SEQ ID NO: 3587 - protein, 15 aa, Fagopyrum esculentum
YKNAILGPRWNLNAH

SEQ ID NO: 3588 - protein, 15 aa, Fagopyrum esculentum
KNAILGPRWNLNAHS

SEQ ID NO: 3589 - protein, 15 aa, Fagopyrum esculentum
SNNLPILEFIQLSAQ

SEQ ID NO: 3590 - protein, 15 aa, Fagopyrum esculentum
RWNLNAHSALYVTRG

SEQ ID NO: 3591 - protein, 15 aa, Fagopyrum esculentum
SAQHVVLYKNAILGP

SEQ ID NO: 3592 - protein, 15 aa, Fagopyrum esculentum
TSVLRAIPVEVLANS

SEQ ID NO: 3593 - protein, 15 aa, Fagopyrum esculentum
FCNLKFKQNVNRPSR

SEQ ID NO: 3594 - protein, 15 aa, Fagopyrum esculentum
VVGDEGRSVFDDNVQ

SEQ ID NO: 3595 - protein, 15 aa, Fagopyrum esculentum
VNRPSRADVFNPRAG

SEQ ID NO: 3596 - protein, 15 aa, Fagopyrum esculentum
SYDISTKEAFRLKNG

SEQ ID NO: 3597 - protein, 15 aa, Fagopyrum esculentum
LSAQHVVLYKNAILG

SEQ ID NO: 3598 - protein, 15 aa, Fagopyrum esculentum
FIQLSAQHVVLYKNA

SEQ ID NO: 3599 - protein, 15 aa, Fagopyrum esculentum
QVVGDEGRSVFDDNV

SEQ ID NO: 3600 - protein, 15 aa, Fagopyrum esculentum
FKQNVNRPSRADVFN

SEQ ID NO: 3601 - protein, 15 aa, Fagopyrum esculentum
AGRINTVNSNNLPIL

SEQ ID NO: 3602 - protein, 15 aa, Fagopyrum esculentum
DNVQRGQILVVPQGF

SEQ ID NO: 3603 - protein, 15 aa, Fagopyrum esculentum
IQLSAQHVVLYKNAI

SEQ ID NO: 3604 - protein, 15 aa, Fagopyrum esculentum
VDQNKLPILEFIDMS

SEQ ID NO: 3605 - protein, 15 aa, Fagopyrum tataricum
VEVFLPFQSRDEKER

SEQ ID NO: 3606 - protein, 15 aa, Fagopyrum tataricum
QHVVLYKNAILGPRW

SEQ ID NO: 3607 - protein, 15 aa, Fagopyrum tataricum
EVEVFLPFQSRDEKE

SEQ ID NO: 3608 - protein, 15 aa, Fagopyrum tataricum
AFRLKNGRQEVEVFL

SEQ ID NO: 3609 - protein, 15 aa, Fagopyrum tataricum
EVFLPFQSRDEKERE

SEQ ID NO: 3610 - protein, 15 aa, Fagopyrum tataricum
VQRGQILVVPQGFAV

SEQ ID NO: 3611 - protein, 15 aa, Fagopyrum tataricum
QLSAQHVVLYKNAIL

SEQ ID NO: 3612 - protein, 15 aa, Fagopyrum tataricum
VQVVGDEGRSVFDDN

SEQ ID NO: 3613 - protein, 15 aa, Fagopyrum tataricum
YVTRGEGRVQVVGDE

SEQ ID NO: 3614 - protein, 15 aa, Fagopyrum tataricum
VGDEGRSVFDDNVQR

SEQ ID NO: 3615 - protein, 15 aa, Fagopyrum tataricum
GKTSVLRAIPVEVLA

SEQ ID NO: 3616 - protein, 15 aa, Fagopyrum tataricum
PIAGKTSVLRAIPVE

SEQ ID NO: 3617 - protein, 15 aa, Fagopyrum tataricum
YKNAILGPRWNLNAH

SEQ ID NO: 3618 - protein, 15 aa, Fagopyrum tataricum
KNAILGPRWNLNAHS

SEQ ID NO: 3619 - protein, 15 aa, Fagopyrum tataricum
SNNLPILEFIQLSAQ

SEQ ID NO: 3620 - protein, 15 aa, Fagopyrum tataricum
RWNLNAHSALYVTRG

SEQ ID NO: 3621 - protein, 15 aa, Fagopyrum tataricum
SAQHVVLYKNAILGP

SEQ ID NO: 3622 - protein, 15 aa, Fagopyrum tataricum
TSVLRAIPVEVLANS

SEQ ID NO: 3623 - protein, 15 aa, Fagopyrum tataricum
FCNLKFKQNVNRPSR

SEQ ID NO: 3624 - protein, 15 aa, Fagopyrum tataricum
VVGDEGRSVFDDNVQ

SEQ ID NO: 3625 - protein, 15 aa, Fagopyrum tataricum
VNRPSRADVFNPRAG

SEQ ID NO: 3626 - protein, 15 aa, Fagopyrum tataricum
SYDISTKEAFRLKNG

SEQ ID NO: 3627 - protein, 15 aa, Fagopyrum tataricum
LSAQHVVLYKNAILG

SEQ ID NO: 3628 - protein, 15 aa, Fagopyrum tataricum
FIQLSAQHVVLYKNA

SEQ ID NO: 3629 - protein, 15 aa, Fagopyrum tataricum
QVVGDEGRSVFDDNV

SEQ ID NO: 3630 - protein, 15 aa, Fagopyrum tataricum
FKQNVNRPSRADVFN

SEQ ID NO: 3631 - protein, 15 aa, Fagopyrum tataricum
AGRINTVNSNNLPIL

SEQ ID NO: 3632 - protein, 15 aa, Fagopyrum tataricum
DNVQRGQILVVPQGF

SEQ ID NO: 3633 - protein, 15 aa, Fagopyrum tataricum
IQLSAQHVVLYKNAI

SEQ ID NO: 3634 - protein, 15 aa, Glycine max
AQQSYLQGFSRNILE

SEQ ID NO: 3635 - protein, 15 aa, Glycine max
QQSYLQGFSRNILEA

SEQ ID NO: 3636 - protein, 15 aa, Glycine max
FQLSAQYVVLYKNGI

SEQ ID NO: 3637 - protein, 15 aa, Glycine max
RGQLLVVPQNFVVAE

SEQ ID NO: 3638 - protein, 15 aa, Glycine max
VVAISLLDTSNFNNQ

SEQ ID NO: 3639 - protein, 15 aa, Glycine max
QLSAQYVVLYKNGIY

SEQ ID NO: 3640 - protein, 15 aa, Glycine max
GQLLVVPQNFVVAEQ

SEQ ID NO: 3641 - protein, 15 aa, Glycine max
VFDGELRRGQLLVVP

SEQ ID NO: 3642 - protein, 15 aa, Glycine max
VTVEGGLSVISPKWQ

SEQ ID NO: 3643 - protein, 15 aa, Glycine max
LRQFQLSAQYVVLYK

SEQ ID NO: 3644 - protein, 15 aa, Glycine max
ADFYNPKAGRISTLN

SEQ ID NO: 3645 - protein, 15 aa, Glycine max
LSAQYVVLYKNGIYS

SEQ ID NO: 3646 - protein, 15 aa, Glycine max
ARPSRADFYNPKAGR

SEQ ID NO: 3647 - protein, 15 aa, Glycine max
PVVAISLLDTSNFNN

SEQ ID NO: 3648 - protein, 15 aa, Glycine max
QFQLSAQYVVLYKNG

SEQ ID NO: 3649 - protein, 15 aa, Glycine max
NLNANSVIYVTRGQG

SEQ ID NO: 3650 - protein, 15 aa, Glycine max
SAQYVVLYKNGIYSP

SEQ ID NO: 3651 - protein, 15 aa, Juglans nigra
ALMDTTNNANQLDQN

SEQ ID NO: 3652 - protein, 15 aa, Juglans nigra
NDGDTPVVAVALMDT

SEQ ID NO: 3653 - protein, 15 aa, Juglans nigra
AGVIESWDPNNQQFQ

SEQ ID NO: 3654 - protein, 15 aa, Juglans nigra
YALRGRAEVQVVDNF

SEQ ID NO: 3655 - protein, 15 aa, Juglans nigra
AEAGVIESWDPNNQQ

SEQ ID NO: 3656 - protein, 15 aa, Juglans nigra
TNNANQLDQNPRNFY

SEQ ID NO: 3657 - protein, 15 aa, Juglans nigra
RNEGFEWVSFKTNEN

SEQ ID NO: 3658 - protein, 15 aa, Juglans nigra
ICTLRLRENIGDPSR

SEQ ID NO: 3659 - protein, 15 aa, Juglans nigra
ARNEGFEWVSFKTNE

SEQ ID NO: 3660 - protein, 15 aa, Juglans nigra
GRAEVQVVDNFGQTV

SEQ ID NO: 3661 - protein, 15 aa, Juglans nigra
RALPEEVLANALQIP

SEQ ID NO: 3662 - protein, 15 aa, Juglans nigra
AIRALPEEVLANALQ

SEQ ID NO: 3663 - protein, 15 aa, Juglans nigra
AVVKRARNEGFEWVS

SEQ ID NO: 3664 - protein, 15 aa, Juglans nigra
LRGRAEVQVVDNFGQ

SEQ ID NO: 3665 - protein, 15 aa, Juglans nigra
RGRAEVQVVDNFGQT

SEQ ID NO: 3666 - protein, 15 aa, Juglans nigra
WVSFKTNENAMVSPL

SEQ ID NO: 3667 - protein, 15 aa, Juglans nigra
FEWVSFKTNENAMVS

SEQ ID NO: 3668 - protein, 15 aa, Juglans nigra
NNANQLDQNPRNFYL

SEQ ID NO: 3669 - protein, 15 aa, Juglans nigra
PEEVLANALQIPRED

SEQ ID NO: 3670 - protein, 15 aa, Juglans nigra
RAEVQVVDNFGQTVF

SEQ ID NO: 3671 - protein, 15 aa, Juglans nigra
PNNQQFQCAGVAVVR

SEQ ID NO: 3672 - protein, 15 aa, Juglans nigra
EAEAGVIESWDPNNQ

SEQ ID NO: 3673 - protein, 15 aa, Juglans nigra
AHWCYNDGDTPVVAV

SEQ ID NO: 3674 - protein, 15 aa, Juglans nigra
YLAGNPDDEFRPQGQ

SEQ ID NO: 3675 - protein, 15 aa, Juglans nigra
FYLAGNPDDEFRPQG

SEQ ID NO: 3676 - protein, 15 aa, Juglans nigra
GRISTANSHTLPVLR

SEQ ID NO: 3677 - protein, 15 aa, Juglans regia
QLEREAKELSFNMPR

SEQ ID NO: 3678 - protein, 15 aa, Juglans regia
VNNPGQFREYYAAGA

SEQ ID NO: 3679 - protein, 15 aa, Juglans regia
MVPHYNSKATVVVYV

SEQ ID NO: 3680 - protein, 15 aa, Juglans regia
EREAKELSFNMPREE

SEQ ID NO: 3681 - protein, 15 aa, Juglans regia
PVVAISLLDTNNNAN

SEQ ID NO: 3682 - protein, 15 aa, Juglans regia
LNRLDALEPTNRIEA

SEQ ID NO: 3683 - protein, 15 aa, Juglans regia
VAISLLDTNNNANQL

SEQ ID NO: 3684 - protein, 15 aa, Juglans regia
AGVIESWDPNNQQFQ

SEQ ID NO: 3685 - protein, 15 aa, Juglans regia
RALPEEVLATAFQIP

SEQ ID NO: 3686 - protein, 15 aa, Juglans regia
YALRGRAEVQVVDNF

SEQ ID NO: 3687 - protein, 15 aa, Juglans regia
NRLDALEPTNRIEAE

SEQ ID NO: 3688 - protein, 15 aa, Juglans regia
AIRALPEEVLATAFQ

SEQ ID NO: 3689 - protein, 15 aa, Juglans regia
PEEVLATAFQIPRED

SEQ ID NO: 3690 - protein, 15 aa, Juglans regia
AEAGVIESWDPNNQQ

SEQ ID NO: 3691 - protein, 15 aa, Juglans regia
RNEGFEWVSFKTNEN

SEQ ID NO: 3692 - protein, 15 aa, Juglans regia
ICTLRLRENIGDPSR

SEQ ID NO: 3693 - protein, 15 aa, Juglans regia
PQYSNAPQLVYIARG

SEQ ID NO: 3694 - protein, 15 aa, Juglans regia
ARNEGFEWVSFKTNE

SEQ ID NO: 3695 - protein, 15 aa, Juglans regia
GRAEVQVVDNFGQTV

SEQ ID NO: 3696 - protein, 15 aa, Juglans regia
AVVKRARNEGFEWVS

SEQ ID NO: 3697 - protein, 15 aa, Juglans regia
LRGRAEVQVVDNFGQ

SEQ ID NO: 3698 - protein, 15 aa, Juglans regia
RGRAEVQVVDNFGQT

SEQ ID NO: 3699 - protein, 15 aa, Juglans regia
WVSFKTNENAMVSPL

SEQ ID NO: 3700 - protein, 15 aa, Juglans regia
FEWVSFKTNENAMVS

SEQ ID NO: 3701 - protein, 15 aa, Juglans regia
NNANQLDQNPRNFYL

SEQ ID NO: 3702 - protein, 15 aa, Juglans regia
NPVVAISLLDTNNNA

SEQ ID NO: 3703 - protein, 15 aa, Juglans regia
RAEVQVVDNFGQTVF

SEQ ID NO: 3704 - protein, 15 aa, Juglans regia
PNNQQFQCAGVAVVR

SEQ ID NO: 3705 - protein, 15 aa, Juglans regia
EAEAGVIESWDPNNQ

SEQ ID NO: 3706 - protein, 15 aa, Juglans regia
YLAGNPDDEFRPQGQ

SEQ ID NO: 3707 - protein, 15 aa, Juglans regia
FYLAGNPDDEFRPQG

SEQ ID NO: 3708 - protein, 15 aa, Juglans regia
NNNANQLDQNPRNFY

SEQ ID NO: 3709 - protein, 15 aa, Lens culinaris
SFLSGFSKNILEAAF

SEQ ID NO: 3710 - protein, 15 aa, Lens culinaris
NEDVIVKVSREQIEE

SEQ ID NO: 3711 - protein, 15 aa, Lens culinaris
GHPVAINASSDLNLI

SEQ ID NO: 3712 - protein, 15 aa, Lens culinaris
ASSDLNLIGFGINAK

SEQ ID NO: 3713 - protein, 15 aa, Lens culinaris
LIGFGINAKNNQRNF

SEQ ID NO: 3714 - protein, 15 aa, Lens culinaris
DVIVKVSREQIEELS

SEQ ID NO: 3715 - protein, 15 aa, Lens culinaris
SKNILEAAFNTEYEE

SEQ ID NO: 3716 - protein, 15 aa, Lens culinaris
LNLIGFGINAKNNQR

SEQ ID NO: 3717 - protein, 15 aa, Lens culinaris
AKNNQRNFLAGEEDN

SEQ ID NO: 3718 - protein, 15 aa, Lens culinaris
AGHPVAINASSDLNL

SEQ ID NO: 3719 - protein, 15 aa, Lens culinaris
IVKVSREQIEELSKN

SEQ ID NO: 3720 - protein, 15 aa, Lens culinaris
VAINASSDLNLIGFG

SEQ ID NO: 3721 - protein, 15 aa, Lens culinaris
NLIGFGINAKNNQRN

SEQ ID NO: 3722 - protein, 15 aa, Lens culinaris
VKVSREQIEELSKNA

SEQ ID NO: 3723 - protein, 15 aa, Lens culinaris
PSFLSGFSKNILEAA

SEQ ID NO: 3724 - protein, 15 aa, Lens culinaris
EDVIVKVSREQIEEL

SEQ ID NO: 3725 - protein, 15 aa, Lens culinaris
SGFSKNILEAAFNTE

SEQ ID NO: 3726 - protein, 15 aa, Lens culinaris
PVAINASSDLNLIGF

SEQ ID NO: 3727 - protein, 15 aa, Lens culinaris
DLNLIGFGINAKNNQ

SEQ ID NO: 3728 - protein, 15 aa, Lens culinaris
SDLNLIGFGINAKNN

SEQ ID NO: 3729 - protein, 15 aa, Lens culinaris
SSDLNLIGFGINAKN

SEQ ID NO: 3730 - protein, 15 aa, Lens culinaris
FSKNILEAAFNTEYE

SEQ ID NO: 3731 - protein, 15 aa, Lens culinaris
EKNPQLQDLDIFVNS

SEQ ID NO: 3732 - protein, 15 aa, Lupinus albus
SYILNPDDNQKLRVV

SEQ ID NO: 3733 - protein, 15 aa, Lupinus albus
YILNPDDNQKLRVVK

SEQ ID NO: 3734 - protein, 15 aa, Lupinus albus
FSRNTLEATFNTRYE

SEQ ID NO: 3735 - protein, 15 aa, Lupinus albus
LILPKHSDADYVLVV

SEQ ID NO: 3736 - protein, 15 aa, Lupinus albus
EEVRRYSARLSEGDI

SEQ ID NO: 3737 - protein, 15 aa, Lupinus albus
KHSDADYVLVVLNGR

SEQ ID NO: 3738 - protein, 15 aa, Lupinus albus
TSYILNPDDNQKLRV

SEQ ID NO: 3739 - protein, 15 aa, Lupinus albus
LIKNQQQSYFANALP

SEQ ID NO: 3740 - protein, 15 aa, Lupinus albus
AGSEDNVIRQLDREV

SEQ ID NO: 3741 - protein, 15 aa, Lupinus albus
EVRRYSARLSEGDIF

SEQ ID NO: 3742 - protein, 15 aa, Lupinus albus
SYFSGFSRNTLEATF

SEQ ID NO: 3743 - protein, 15 aa, Lupinus albus
GDALRIPAGSTSYIL

SEQ ID NO: 3744 - protein, 15 aa, Lupinus angustifolius
TSYILNPDDNQNLRV

SEQ ID NO: 3745 - protein, 15 aa, Lupinus angustifolius
GDALRLPAGTTSYIL

SEQ ID NO: 3746 - protein, 15 aa, Lupinus angustifolius
LIKNQQQSYFANAQP

SEQ ID NO: 3747 - protein, 15 aa, Lupinus angustifolius
EEVRRYSARLSEGDI

SEQ ID NO: 3748 - protein, 15 aa, Lupinus angustifolius
RRYSARLSEGDIFVI

SEQ ID NO: 3749 - protein, 15 aa, Lupinus angustifolius
LILPKHSDADYILVV

SEQ ID NO: 3750 - protein, 15 aa, Lupinus angustifolius
EVRRYSARLSEGDIF

SEQ ID NO: 3751 - protein, 15 aa, Lupinus angustifolius
SYILNPDDNQNLRVV

SEQ ID NO: 3752 - protein, 15 aa, Lupinus angustifolius
KHSDADYILVVLNGR

SEQ ID NO: 3753 - protein, 15 aa, Lupinus angustifolius
SYFSGFSKNTLEATF

SEQ ID NO: 3754 - protein, 15 aa, Pinus koraiensis
GEGRIEMACPHLGQE

SEQ ID NO: 3755 - protein, 15 aa, Pisum sativum
AENNERNFLAGEEDN

SEQ ID NO: 3756 - protein, 15 aa, Pisum sativum
GHPVAINASSDLNLI

SEQ ID NO: 3757 - protein, 15 aa, Pisum sativum
ASSDLNLIGFGINAE

SEQ ID NO: 3758 - protein, 15 aa, Pisum sativum
NVIVKVSREQIEELS

SEQ ID NO: 3759 - protein, 15 aa, Pisum sativum
AGHPVAINASSDLNL

SEQ ID NO: 3760 - protein, 15 aa, Pisum sativum
IVKVSREQIEELSKN

SEQ ID NO: 3761 - protein, 15 aa, Pisum sativum
VAINASSDLNLIGFG

SEQ ID NO: 3762 - protein, 15 aa, Pisum sativum
SGFSKNILEAAFNTN

SEQ ID NO: 3763 - protein, 15 aa, Pisum sativum
VKVSREQIEELSKNA

SEQ ID NO: 3764 - protein, 15 aa, Pisum sativum
PVAINASSDLNLIGF

SEQ ID NO: 3765 - protein, 15 aa, Pisum sativum
PSLLSGFSKNILEAA

SEQ ID NO: 3766 - protein, 15 aa, Pisum sativum
EKNQQLQDLDIFVNS

SEQ ID NO: 3767 - protein, 15 aa, Pisum sativum
SLLSGFSKNILEAAF

SEQ ID NO: 3768 - protein, 15 aa, Pisum sativum
FSKNILEAAFNTNYE

SEQ ID NO: 3769 - protein, 15 aa, Pisum sativum
SKNILEAAFNTNYEE

SEQ ID NO: 3770 - protein, 15 aa, Pisum sativum
EGALMLPHYNSRAIV

SEQ ID NO: 3771 - protein, 15 aa, Pisum sativum
LFVSCVEINEGALML

SEQ ID NO: 3772 - protein, 15 aa, Pisum sativum
RLIKNQKQSHFANAE

SEQ ID NO: 3773 - protein, 15 aa, Pisum sativum
GHPVAITASSNLNLL

SEQ ID NO: 3774 - protein, 15 aa, Pisum sativum
AGHPVAITASSNLNL

SEQ ID NO: 3775 - protein, 15 aa, Pisum sativum
INEGALMLPHYNSRA

SEQ ID NO: 3776 - protein, 15 aa, Pisum sativum
ITPEKKYPQLQDLDL

SEQ ID NO: 3777 - protein, 15 aa, Pisum sativum
VIIPAGHPVAITASS

SEQ ID NO: 3778 - protein, 15 aa, Pisum sativum
RGFSKNILEASYNTR

SEQ ID NO: 3779 - protein, 15 aa, Pisum sativum
CVEINEGALMLPHYN

SEQ ID NO: 3780 - protein, 15 aa, Pisum sativum
PVNGPGKFEAFDLAK

SEQ ID NO: 3781 - protein, 15 aa, Pisum sativum
VKVSREQIEELKKLA

SEQ ID NO: 3782 - protein, 15 aa, Pisum sativum
IVKVSREQIEELKKL

SEQ ID NO: 3783 - protein, 15 aa, Pistacia vera
LNLPILRFLQLSAKK

SEQ ID NO: 3784 - protein, 15 aa, Pistacia vera
FEWVSFKTNGLSQTS

SEQ ID NO: 3785 - protein, 15 aa, Pistacia vera
ILRFLQLSAKKGVLH

SEQ ID NO: 3786 - protein, 15 aa, Pistacia vera
LAPHWNVNAHSIVYI

SEQ ID NO: 3787 - protein, 15 aa, Pistacia vera
YNINDPSRADVYNPR

SEQ ID NO: 3788 - protein, 15 aa, Pistacia vera
VPQNFAVVKRASSDK

SEQ ID NO: 3789 - protein, 15 aa, Pistacia vera
FEDEHFTTRVKTEQG

SEQ ID NO: 3790 - protein, 15 aa, Pistacia vera
TDPELKQCKHQCKVQ

SEQ ID NO: 3791 - protein, 15 aa, Pistacia vera
RAFSREVLEAALKTP

SEQ ID NO: 3792 - protein, 15 aa, Pistacia vera
PESFYRAFSREVLEA

SEQ ID NO: 3793 - protein, 15 aa, Pistacia vera
FEVNAEGNIRYTLAG

SEQ ID NO: 3794 - protein, 15 aa, Pistacia vera
HQCKVQRQYDEEQKE

SEQ ID NO: 3795 - protein, 15 aa, Pistacia vera
PGGENPESFYRAFSR

SEQ ID NO: 3796 - protein, 15 aa, Pistacia vera
QCKHQCKVQRQYDEE

SEQ ID NO: 3797 - protein, 15 aa, Pistacia vera
HYEVFHGPGGENPES

SEQ ID NO: 3798 - protein, 15 aa, Pistacia vera
GEGRLEIACPHLSSS

SEQ ID NO: 3799 - protein, 15 aa, Pistacia vera
ELKQCKHQCKVQRQY

SEQ ID NO: 3800 - protein, 15 aa, Pistacia vera
VNITKGGMSGPFYNS

SEQ ID NO: 3801 - protein, 15 aa, Pistacia vera
RDKLEKLFEKQDEGA

SEQ ID NO: 3802 - protein, 15 aa, Pistacia vera
KTPRDKLEKLFEKQD

SEQ ID NO: 3803 - protein, 15 aa, Pistacia vera
YRAFSREVLEAALKT

SEQ ID NO: 3804 - protein, 15 aa, Pistacia vera
ERQDGGQQKQLCRFR

SEQ ID NO: 3805 - protein, 15 aa, Pistacia vera
GGENPESFYRAFSRE

SEQ ID NO: 3806 - protein, 15 aa, Pistacia vera
KQCERQDGGQQKQLC

SEQ ID NO: 3807 - protein, 15 aa, Pistacia vera
PYVFEDEHFTTRVKT

SEQ ID NO: 3808 - protein, 15 aa, Pistacia vera
AKELAFKTKGEEVDK

SEQ ID NO: 3809 - protein, 15 aa, Pistacia vera
LAGKKNIIEVMEKEA

SEQ ID NO: 3810 - protein, 15 aa, Pistacia vera
EAALKTPRDKLEKLF

SEQ ID NO: 3811 - protein, 15 aa, Pistacia vera
QCMKQCERQDGGQQK

SEQ ID NO: 3812 - protein, 15 aa, Pistacia vera
ESFYRAFSREVLEAA

SEQ ID NO: 3813 - protein, 15 aa, Pistacia vera
EGRLEIACPHLSSSK

SEQ ID NO: 3814 - protein, 15 aa, Pistacia vera
DPELKQCKHQCKVQR

SEQ ID NO: 3815 - protein, 15 aa, Pistacia vera
QCKVQRQYDEEQKEQ

SEQ ID NO: 3816 - protein, 15 aa, Pistacia vera
ENPESFYRAFSREVL

SEQ ID NO: 3817 - protein, 15 aa, Pistacia vera
EVDKVFGKQDEEFFF

SEQ ID NO: 3818 - protein, 15 aa, Pistacia vera
QAFVVPNHMDADSIF

SEQ ID NO: 3819 - protein, 15 aa, Pistacia vera
EKLFEKQDEGAIVKA

SEQ ID NO: 3820 - protein, 15 aa, Pistacia vera
QNLEILCFEVNAEGN

SEQ ID NO: 3821 - protein, 15 aa, Pistacia vera
NPESFYRAFSREVLE

SEQ ID NO: 3822 - protein, 15 aa, Pistacia vera
PFVTVASGNQNLEIL

SEQ ID NO: 3823 - protein, 15 aa, Pistacia vera
IVKASKEQIRAMSRR

SEQ ID NO: 3824 - protein, 15 aa, Pistacia vera
TVASGNQNLEILCFE

SEQ ID NO: 3825 - protein, 15 aa, Pistacia vera
ASKEQIRAMSRRGEG

SEQ ID NO: 3826 - protein, 15 aa, Pistacia vera
AFSREVLEAALKTPR

SEQ ID NO: 3827 - protein, 15 aa, Pistacia vera
SFYRAFSREVLEAAL

SEQ ID NO: 3828 - protein, 15 aa, Pistacia vera
TLAGKKNIIEVMEKE

SEQ ID NO: 3829 - protein, 15 aa, Pistacia vera
PGHYEVFHGPGGENP

SEQ ID NO: 3830 - protein, 15 aa, Pistacia vera
GENPESFYRAFSREV

SEQ ID NO: 3831 - protein, 15 aa, Pistacia vera
PELKQCKHQCKVQRQ

SEQ ID NO: 3832 - protein, 15 aa, Pistacia vera
VKASKEQIRAMSRRG

SEQ ID NO: 3833 - protein, 15 aa, Pistacia vera
ITKGGMSGPFYNSRA

SEQ ID NO: 3834 - protein, 15 aa, Pistacia vera
ALKTPRDKLEKLFEK

SEQ ID NO: 3835 - protein, 15 aa, Pistacia vera
CKHQCKVQRQYDEEQ

SEQ ID NO: 3836 - protein, 15 aa, Pistacia vera
FYRAFSREVLEAALK

SEQ ID NO: 3837 - protein, 15 aa, Pistacia vera
HMDADSIFFVSWGRG

SEQ ID NO: 3838 - protein, 15 aa, Pistacia vera
KQCKHQCKVQRQYDE

SEQ ID NO: 3839 - protein, 15 aa, Pistacia vera
IFFVSWGRGTITKIR

SEQ ID NO: 3840 - protein, 15 aa, Pistacia vera
EEVLANAFQISREDA

SEQ ID NO: 3841 - protein, 15 aa, Pistacia vera
VPQNFAVVKRARGQR

SEQ ID NO: 3842 - protein, 15 aa, Pistacia vera
NALMVPHWNFNAHSI

SEQ ID NO: 3843 - protein, 15 aa, Pistacia vera
FKTNDRAMISPLAGS

SEQ ID NO: 3844 - protein, 15 aa, Pistacia vera
SFKTNDRAMISPLAG

SEQ ID NO: 3845 - protein, 15 aa, Pistacia vera
YPRKFNLAGNPEDEF

SEQ ID NO: 3846 - protein, 15 aa, Pistacia vera
CQIDQLDALEPDNRV

SEQ ID NO: 3847 - protein, 15 aa, Pistacia vera
VSEGQIFVVPQNFAV

SEQ ID NO: 3848 - protein, 15 aa, Pistacia vera
QNQLDMYPRKFNLAG

SEQ ID NO: 3849 - protein, 15 aa, Pistacia vera
GLEETICTMKLKENI

SEQ ID NO: 3850 - protein, 15 aa, Pistacia vera
RKFNLAGNPEDEFQQ

SEQ ID NO: 3851 - protein, 15 aa, Pistacia vera
RGQRFEWISFKTNDR

SEQ ID NO: 3852 - protein, 15 aa, Pistacia vera
NRGAIVKVKGDLQVI

SEQ ID NO: 3853 - protein, 15 aa, Prunus Dulcis
ALPDEVLANAYQISR

SEQ ID NO: 3854 - protein, 15 aa, Prunus Dulcis
IFSPRAGRISTLNSH

SEQ ID NO: 3855 - protein, 15 aa, Prunus Dulcis
RAGRISTLNSHNLPI

SEQ ID NO: 3856 - protein, 15 aa, Prunus Dulcis
DEVLANAYQISREQA

SEQ ID NO: 3857 - protein, 15 aa, Prunus Dulcis
DHNQLDQNPRKFYLA

SEQ ID NO: 3858 - protein, 15 aa, Prunus Dulcis
STLNSHNLPILRFLR

SEQ ID NO: 3859 - protein, 15 aa, Prunus Dulcis
LANAYQISREQARQL

SEQ ID NO: 3860 - protein, 15 aa, Sesamum indicum
KDPELKQCKHQCKAQ

SEQ ID NO: 3861 - protein, 15 aa, Sesamum indicum
QLEREAKELAFGMPA

SEQ ID NO: 3862 - protein, 15 aa, Sesamum indicum
EREAKELAFGMPARE

SEQ ID NO: 3863 - protein, 15 aa, Sesamum indicum
VVASESKDPELKQCK

SEQ ID NO: 3864 - protein, 15 aa, Sesamum indicum
VKASEEQVRAMSRHE

SEQ ID NO: 3865 - protein, 15 aa, Sesamum indicum
IVKASEEQVRAMSRH

SEQ ID NO: 3866 - protein, 15 aa, Sesamum indicum
SKATKIALVVDGEGY

SEQ ID NO: 3867 - protein, 15 aa, Sesamum indicum
TRGTVVIIPAGHPFV

SEQ ID NO: 3868 - protein, 15 aa, Sesamum indicum
ESKDPELKQCKHQCK

SEQ ID NO: 3869 - protein, 15 aa, Sesamum indicum
ELKQCKHQCKAQQQI

SEQ ID NO: 3870 - protein, 15 aa, Sesamum indicum
QCKHQCKAQQQISKE

SEQ ID NO: 3871 - protein, 15 aa, Sesamum indicum
SKDPELKQCKHQCKA

SEQ ID NO: 3872 - protein, 15 aa, Sesamum indicum
DPELKQCKHQCKAQQ

SEQ ID NO: 3873 - protein, 15 aa, Sesamum indicum
QVLCFEVNANNNEKF

SEQ ID NO: 3874 - protein, 15 aa, Sesamum indicum
AMTAPHYNSKATKIA

SEQ ID NO: 3875 - protein, 15 aa, Sesamum indicum
PELKQCKHQCKAQQQ

SEQ ID NO: 3876 - protein, 15 aa, Sesamum indicum
KQCKHQCKAQQQISK

SEQ ID NO: 3877 - protein, 15 aa, Sesamum indicum
MTAPHYNSKATKIAL

SEQ ID NO: 3878 - protein, 15 aa, Sesamum indicum
LSAEKGNLYSNALVS

SEQ ID NO: 3879 - protein, 15 aa, Sesamum indicum
NNQQFECAGVAAVRN

SEQ ID NO: 3880 - protein, 15 aa, Sesamum indicum
SFKTNDNAMTSQLAG

SEQ ID NO: 3881 - protein, 15 aa, Sesamum indicum
VVGHTGRSVFDGVVR

SEQ ID NO: 3882 - protein, 15 aa, Sesamum indicum
WDRNNQQFECAGVAA

SEQ ID NO: 3883 - protein, 15 aa, Sesamum indicum
LNAHSIIYITRGSGR

SEQ ID NO: 3884 - protein, 15 aa, Sesamum indicum
ISFKTNDNAMTSQLA

SEQ ID NO: 3885 - protein, 15 aa, Sesamum indicum
FKTNDNAMTSQLAGR

SEQ ID NO: 3886 - protein, 15 aa, Sesamum indicum
QVVGHTGRSVFDGVV

SEQ ID NO: 3887 - protein, 15 aa, Sinapis alba
PQDNGLEETICSMRT

SEQ ID NO: 3888 - protein, 15 aa, Sinapis alba
SYTLPILQYIRLSAT

SEQ ID NO: 3889 - protein, 15 aa, Sinapis alba
QDNGLEETICSMRTH

SEQ ID NO: 3890 - protein, 15 aa, Sinapis alba
YTLPILQYIRLSATR

SEQ ID NO: 3891 - protein, 15 aa, Vigna radiata
QQSYLQGFSKNILEA

SEQ ID NO: 3892 - protein, 15 aa, Vigna radiata
YLQGFSKNILEASFD

SEQ ID NO: 3893 - protein, 15 aa, Vigna radiata
TLLLPHHADADFLLV

SEQ ID NO: 3894 - protein, 15 aa, Vigna radiata
PEKNPQLRDLDMFIR

SEQ ID NO: 3895 - protein, 15 aa, Vigna radiata
AQQSYLQGFSKNILE

SEQ ID NO: 3896 - protein, 15 aa, Anacardium occidentale
KGGMSVPFYNSRATK

SEQ ID NO: 3897 - protein, 15 aa, Anacardium occidentale
TTKVKTEQGKVVLLP

SEQ ID NO: 3898 - protein, 15 aa, Anacardium occidentale
VPSHMDADSIFFVSW

SEQ ID NO: 3899 - protein, 15 aa, Anacardium occidentale
EGGQQKQLCRFRCQE

SEQ ID NO: 3900 - protein, 15 aa, Anacardium occidentale
ALEKYRLAVLVANPQ

SEQ ID NO: 3901 - protein, 15 aa, Anacardium occidentale
IRAMSRRGEGPKIWP

SEQ ID NO: 3902 - protein, 15 aa, Anacardium occidentale
ASGNENLEIVCFEVN

SEQ ID NO: 3903 - protein, 15 aa, Anacardium occidentale
TKIAIVVSGEGCVEI

SEQ ID NO: 3904 - protein, 15 aa, Anacardium occidentale
RLAVLVANPQAFVVP

SEQ ID NO: 3905 - protein, 15 aa, Anacardium occidentale
FEVFHGPGGENPESF

SEQ ID NO: 3906 - protein, 15 aa, Anacardium occidentale
EDFTTKVKTEQGKVV

SEQ ID NO: 3907 - protein, 15 aa, Anacardium occidentale
MRQCERQEGGQQKQL

SEQ ID NO: 3908 - protein, 15 aa, Anacardium occidentale
SWGRGTITKILENKR

SEQ ID NO: 3909 - protein, 15 aa, Anacardium occidentale
VSVLVLCLGFALAKI

SEQ ID NO: 3910 - protein, 15 aa, Anacardium occidentale
MVVSYANITKGGMSV

SEQ ID NO: 3911 - protein, 15 aa, Anacardium occidentale
KECEKYYKEKKGRER

SEQ ID NO: 3912 - protein, 15 aa, Anacardium occidentale
IAIVVSGEGCVEIAC

SEQ ID NO: 3913 - protein, 15 aa, Anacardium occidentale
YRLAVLVANPQAFVV

SEQ ID NO: 3914 - protein, 15 aa, Anacardium occidentale
VFEDEDFTTKVKTEQ

SEQ ID NO: 3915 - protein, 15 aa, Anacardium occidentale
CRFRCQERYKKERGQ

SEQ ID NO: 3916 - protein, 15 aa, Anacardium occidentale
QCVKECEKYYKEKKG

SEQ ID NO: 3917 - protein, 15 aa, Anacardium occidentale
KKNIIKVMEKEAKEL

SEQ ID NO: 3918 - protein, 15 aa, Anacardium occidentale
PSQSNKYGQLFEAER

SEQ ID NO: 3919 - protein, 15 aa, Anacardium occidentale
SGNENLEIVCFEVNA

SEQ ID NO: 3920 - protein, 15 aa, Anacardium occidentale
NPQAFVVPSHMDADS

SEQ ID NO: 3921 - protein, 15 aa, Anacardium occidentale
MEGEEVDKVFGKQDE

SEQ ID NO: 3922 - protein, 15 aa, Anacardium occidentale
NPYVFEDEDFTTKVK

SEQ ID NO: 3923 - protein, 15 aa, Anacardium occidentale
ATKIAIVVSGEGCVE

SEQ ID NO: 3924 - protein, 15 aa, Anacardium occidentale
KEQCVKECEKYYKEK

SEQ ID NO: 3925 - protein, 15 aa, Anacardium occidentale
SFKLFKKDPSQSNKY

SEQ ID NO: 3926 - protein, 15 aa, Anacardium occidentale
PFYNSRATKIAIVVS

SEQ ID NO: 3927 - protein, 15 aa, Anacardium occidentale
HEPAEKHLSQCMRQC

SEQ ID NO: 3928 - protein, 15 aa, Anacardium occidentale
DEEFFFQGPEWRKEK

SEQ ID NO: 3929 - protein, 15 aa, Anacardium occidentale
TGSFKLFKKDPSQSN

SEQ ID NO: 3930 - protein, 15 aa, Anacardium occidentale
EKYRLAVLVANPQAF

SEQ ID NO: 3931 - protein, 15 aa, Anacardium occidentale
LAKIDPELKQCKHQC

SEQ ID NO: 3932 - protein, 15 aa, Anacardium occidentale
DEAEEEDENPYVFED

SEQ ID NO: 3933 - protein, 15 aa, Anacardium occidentale
KVMEKEAKELAFKME

SEQ ID NO: 3934 - protein, 15 aa, Anacardium occidentale
DADSIFFVSWGRGTI

SEQ ID NO: 3935 - protein, 15 aa, Anacardium occidentale
KVQRQYDEQQKEQCV

SEQ ID NO: 3936 - protein, 15 aa, Anacardium occidentale
FKKDPSQSNKYGQLF

SEQ ID NO: 3937 - protein, 15 aa, Anacardium occidentale
VVPSHMDADSIFFVS

SEQ ID NO: 3938 - protein, 15 aa, Anacardium occidentale
GNENLEIVCFEVNAE

SEQ ID NO: 3939 - protein, 15 aa, Anacardium occidentale
AIVVSGEGCVEIACP

SEQ ID NO: 3940 - protein, 15 aa, Anacardium occidentale
DKVFGKQDEEFFFQG

SEQ ID NO: 3941 - protein, 15 aa, Anacardium occidentale
MEKEAKELAFKMEGE

SEQ ID NO: 3942 - protein, 15 aa, Anacardium occidentale
AMSRRGEGPKIWPFT

SEQ ID NO: 3943 - protein, 15 aa, Anacardium occidentale
QGKVVLLPKFTQKSK

SEQ ID NO: 3944 - protein, 15 aa, Anacardium occidentale
SLFLVSVLVLCLGFA

SEQ ID NO: 3945 - protein, 15 aa, Anacardium occidentale
EAALKTSKDTLEKLF

SEQ ID NO: 3946 - protein, 15 aa, Anacardium occidentale
KQDEEFFFQGPEWRK

SEQ ID NO: 3947 - protein, 15 aa, Anacardium occidentale
TEESTGSFKLFKKDP

SEQ ID NO: 3948 - protein, 15 aa, Anacardium occidentale
TKVKTEQGKVVLLPK

SEQ ID NO: 3949 - protein, 15 aa, Anacardium occidentale
RYTLAGKKNIIKVME

SEQ ID NO: 3950 - protein, 15 aa, Anacardium occidentale
GGMSVPFYNSRATKI

SEQ ID NO: 3951 - protein, 15 aa, Anacardium occidentale
FHGPGGENPESFYRA

SEQ ID NO: 3952 - protein, 15 aa, Anacardium occidentale
LVANPQAFVVPSHMD

SEQ ID NO: 3953 - protein, 15 aa, Anacardium occidentale
EAKELAFKMEGEEVD

SEQ ID NO: 3954 - protein, 15 aa, Anacardium occidentale
VFHGPGGENPESFYR

SEQ ID NO: 3955 - protein, 15 aa, Anacardium occidentale
VVSGEGCVEIACPHL

SEQ ID NO: 3956 - protein, 15 aa, Anacardium occidentale
RRGEGPKIWPFTEES

SEQ ID NO: 3957 - protein, 15 aa, Anacardium occidentale
PSYKKLRARIRKDTV

SEQ ID NO: 3958 - protein, 15 aa, Anacardium occidentale
IVCFEVNAEGNIRYT

SEQ ID NO: 3959 - protein, 15 aa, Anacardium occidentale
KVKTEQGKVVLLPKF

SEQ ID NO: 3960 - protein, 15 aa, Anacardium occidentale
EVFHGPGGENPESFY

SEQ ID NO: 3961 - protein, 15 aa, Anacardium occidentale
FTTKVKTEQGKVVLL

SEQ ID NO: 3962 - protein, 15 aa, Anacardium occidentale
HGPGGENPESFYRAF

SEQ ID NO: 3963 - protein, 15 aa, Anacardium occidentale
VDEPSTHEPAEKHLS

SEQ ID NO: 3964 - protein, 15 aa, Anacardium occidentale
AEGNIRYTLAGKKNI

SEQ ID NO: 3965 - protein, 15 aa, Anacardium occidentale
LAFKMEGEEVDKVFG

SEQ ID NO: 3966 - protein, 15 aa, Anacardium occidentale
PFYIANNDENEKLYL

SEQ ID NO: 3967 - protein, 15 aa, Anacardium occidentale
VLVANPQAFVVPSHM

SEQ ID NO: 3968 - protein, 15 aa, Anacardium occidentale
RIDYPPLEKLDMVVS

SEQ ID NO: 3969 - protein, 15 aa, Anacardium occidentale
YKKERGQHNYKREDD

SEQ ID NO: 3970 - protein, 15 aa, Anacardium occidentale
EIVCFEVNAEGNIRY

SEQ ID NO: 3971 - protein, 15 aa, Anacardium occidentale
RGTITKILENKRESI

SEQ ID NO: 3972 - protein, 15 aa, Anacardium occidentale
NLEIVCFEVNAEGNI

SEQ ID NO: 3973 - protein, 15 aa, Anacardium occidentale
PQAFVVPSHMDADSI

SEQ ID NO: 3974 - protein, 15 aa, Anacardium occidentale
DFTTKVKTEQGKVVL

SEQ ID NO: 3975 - protein, 15 aa, Anacardium occidentale
KMEGEEVDKVFGKQD

SEQ ID NO: 3976 - protein, 15 aa, Anacardium occidentale
VSGEGCVEIACPHLS

SEQ ID NO: 3977 - protein, 15 aa, Anacardium occidentale
EQCVKECEKYYKEKK

SEQ ID NO: 3978 - protein, 15 aa, Anacardium occidentale
GSFKLFKKDPSQSNK

SEQ ID NO: 3979 - protein, 15 aa, Anacardium occidentale
ITKILENKRESINVR

SEQ ID NO: 3980 - protein, 15 aa, Anacardium occidentale
FVVPSHMDADSIFFV

SEQ ID NO: 3981 - protein, 15 aa, Anacardium occidentale
LEIVCFEVNAEGNIR

SEQ ID NO: 3982 - protein, 15 aa, Anacardium occidentale
ELAFKMEGEEVDKVF

SEQ ID NO: 3983 - protein, 15 aa, Anacardium occidentale
GGQQKQLCRFRCQER

SEQ ID NO: 3984 - protein, 15 aa, Anacardium occidentale
IIKVMEKEAKELAFK

SEQ ID NO: 3985 - protein, 15 aa, Anacardium occidentale
QLCRFRCQERYKKER

SEQ ID NO: 3986 - protein, 15 aa, Anacardium occidentale
VLVLCLGFALAKIDP

SEQ ID NO: 3987 - protein, 15 aa, Anacardium occidentale
QEGGQQKQLCRFRCQ

SEQ ID NO: 3988 - protein, 15 aa, Anacardium occidentale
MDADSIFFVSWGRGT

SEQ ID NO: 3989 - protein, 15 aa, Anacardium occidentale
EEVDKVFGKQDEEFF

SEQ ID NO: 3990 - protein, 15 aa, Anacardium occidentale
VNLPGHFEVFHGPGG

SEQ ID NO: 3991 - protein, 15 aa, Anacardium occidentale
NLPGHFEVFHGPGGE

SEQ ID NO: 3992 - protein, 15 aa, Anacardium occidentale
GPGGENPESFYRAFS

SEQ ID NO: 3993 - protein, 15 aa, Anacardium occidentale
KKDPSQSNKYGQLFE

SEQ ID NO: 3994 - protein, 15 aa, Anacardium occidentale
IKVMEKEAKELAFKM

SEQ ID NO: 3995 - protein, 15 aa, Anacardium occidentale
QIRAMSRRGEGPKIW

SEQ ID NO: 3996 - protein, 15 aa, Anacardium occidentale
EESTGSFKLFKKDPS

SEQ ID NO: 3997 - protein, 15 aa, Anacardium occidentale
TKGGMSVPFYNSRAT

SEQ ID NO: 3998 - protein, 15 aa, Anacardium occidentale
THEPAEKHLSQCMRQ

SEQ ID NO: 3999 - protein, 15 aa, Anacardium occidentale
VEIACPHLSSSKSSH

SEQ ID NO: 4000 - protein, 15 aa, Anacardium occidentale
LLPKFTQKSKLLHAL

SEQ ID NO: 4001 - protein, 15 aa, Anacardium occidentale
AGKKNIIKVMEKEAK

SEQ ID NO: 4002 - protein, 15 aa, Anacardium occidentale
ITKGGMSVPFYNSRA

SEQ ID NO: 4003 - protein, 15 aa, Anacardium occidentale
KHQCKVQRQYDEQQK

SEQ ID NO: 4004 - protein, 15 aa, Anacardium occidentale
CVKECEKYYKEKKGR

SEQ ID NO: 4005 - protein, 15 aa, Anacardium occidentale
IMKASKEQIRAMSRR

SEQ ID NO: 4006 - protein, 15 aa, Anacardium occidentale
RPVNLPGHFEVFHGP

SEQ ID NO: 4007 - protein, 15 aa, Anacardium occidentale
KDPSQSNKYGQLFEA

SEQ ID NO: 4008 - protein, 15 aa, Anacardium occidentale
KYRLAVLVANPQAFV

SEQ ID NO: 4009 - protein, 15 aa, Anacardium occidentale
VFGKQDEEFFFQGPE

SEQ ID NO: 4010 - protein, 15 aa, Anacardium occidentale
FVSWGRGTITKILEN

SEQ ID NO: 4011 - protein, 15 aa, Anacardium occidentale
TKFSFSLFLVSVLVL

SEQ ID NO: 4012 - protein, 15 aa, Anacardium occidentale
TITKILENKRESINV

SEQ ID NO: 4013 - protein, 15 aa, Anacardium occidentale
TEQGKVVLLPKFTQK

SEQ ID NO: 4014 - protein, 15 aa, Anacardium occidentale
TVASGNENLEIVCFE

SEQ ID NO: 4015 - protein, 15 aa, Anacardium occidentale
GHFEVFHGPGGENPE

SEQ ID NO: 4016 - protein, 15 aa, Anacardium occidentale
LEKYRLAVLVANPQA

SEQ ID NO: 4017 - protein, 15 aa, Anacardium occidentale
EQIRAMSRRGEGPKI

SEQ ID NO: 4018 - protein, 15 aa, Anacardium occidentale
SHPSYKKLRARIRKD

SEQ ID NO: 4019 - protein, 15 aa, Anacardium occidentale
VNAEGNIRYTLAGKK

SEQ ID NO: 4020 - protein, 15 aa, Anacardium occidentale
CKVQRQYDEQQKEQC

SEQ ID NO: 4021 - protein, 15 aa, Anacardium occidentale
GEEVDKVFGKQDEEF

SEQ ID NO: 4022 - protein, 15 aa, Anacardium occidentale
FKLFKKDPSQSNKYG

SEQ ID NO: 4023 - protein, 15 aa, Anacardium occidentale
GQQKQLCRFRCQERY

SEQ ID NO: 4024 - protein, 15 aa, Anacardium occidentale
CFEVNAEGNIRYTLA

SEQ ID NO: 4025 - protein, 15 aa, Anacardium occidentale
VPFYNSRATKIAIVV

SEQ ID NO: 4026 - protein, 15 aa, Anacardium occidentale
KEQIRAMSRRGEGPK

SEQ ID NO: 4027 - protein, 15 aa, Anacardium occidentale
FIVPAGHPFATVASG

SEQ ID NO: 4028 - protein, 15 aa, Anacardium occidentale
IVPAGHPFATVASGN

SEQ ID NO: 4029 - protein, 15 aa, Anacardium occidentale
SQSNKYGQLFEAERI

SEQ ID NO: 4030 - protein, 15 aa, Anacardium occidentale
AERIDYPPLEKLDMV

SEQ ID NO: 4031 - protein, 15 aa, Anacardium occidentale
GVDEPSTHEPAEKHL

SEQ ID NO: 4032 - protein, 15 aa, Anacardium occidentale
IACPHLSSSKSSHPS

SEQ ID NO: 4033 - protein, 15 aa, Anacardium occidentale
NSRATKIAIVVSGEG

SEQ ID NO: 4034 - protein, 15 aa, Anacardium occidentale
DTVFIVPAGHPFATV

SEQ ID NO: 4035 - protein, 15 aa, Anacardium occidentale
GMSVPFYNSRATKIA

SEQ ID NO: 4036 - protein, 15 aa, Anacardium occidentale
DEDFTTKVKTEQGKV

SEQ ID NO: 4037 - protein, 15 aa, Anacardium occidentale
RQYDEQQKEQCVKEC

SEQ ID NO: 4038 - protein, 15 aa, Anacardium occidentale
DENPYVFEDEDFTTK

SEQ ID NO: 4039 - protein, 15 aa, Anacardium occidentale
TIMKASKEQIRAMSR

SEQ ID NO: 4040 - protein, 15 aa, Anacardium occidentale
TPFYIANNDENEKLY

SEQ ID NO: 4041 - protein, 15 aa, Anacardium occidentale
QKQLCRFRCQERYKK

SEQ ID NO: 4042 - protein, 15 aa, Anacardium occidentale
KLLHALEKYRLAVLV

SEQ ID NO: 4043 - protein, 15 aa, Anacardium occidentale
GTITKILENKRESIN

SEQ ID NO: 4044 - protein, 15 aa, Anacardium occidentale
KFTQKSKLLHALEKY

SEQ ID NO: 4045 - protein, 15 aa, Anacardium occidentale
YVFEDEDFTTKVKTE

SEQ ID NO: 4046 - protein, 15 aa, Anacardium occidentale
VQRQYDEQQKEQCVK

SEQ ID NO: 4047 - protein, 15 aa, Anacardium occidentale
LCRFRCQERYKKERG

SEQ ID NO: 4048 - protein, 15 aa, Anacardium occidentale
CLGFALAKIDPELKQ

SEQ ID NO: 4049 - protein, 15 aa, Anacardium occidentale
QDEEFFFQGPEWRKE

SEQ ID NO: 4050 - protein, 15 aa, Anacardium occidentale
PAGHPFATVASGNEN

SEQ ID NO: 4051 - protein, 15 aa, Anacardium occidentale
KEAKELAFKMEGEEV

SEQ ID NO: 4052 - protein, 15 aa, Anacardium occidentale
QKSKLLHALEKYRLA

SEQ ID NO: 4053 - protein, 15 aa, Anacardium occidentale
VSYANITKGGMSVPF

SEQ ID NO: 4054 - protein, 15 aa, Anacardium occidentale
AFVVPSHMDADSIFF

SEQ ID NO: 4055 - protein, 15 aa, Anacardium occidentale
WGRGTITKILENKRE

SEQ ID NO: 4056 - protein, 15 aa, Anacardium occidentale
ENPYVFEDEDFTTKV

SEQ ID NO: 4057 - protein, 15 aa, Anacardium occidentale
QSNKYGQLFEAERID

SEQ ID NO: 4058 - protein, 15 aa, Anacardium occidentale
GKQDEEFFFQGPEWR

SEQ ID NO: 4059 - protein, 15 aa, Anacardium occidentale
YTLAGKKNIIKVMEK

SEQ ID NO: 4060 - protein, 15 aa, Anacardium occidentale
IDYPPLEKLDMVVSY

SEQ ID NO: 4061 - protein, 15 aa, Anacardium occidentale
ENKRESINVRQGDIV

SEQ ID NO: 4062 - protein, 15 aa, Anacardium occidentale
GCVEIACPHLSSSKS

SEQ ID NO: 4063 - protein, 15 aa, Anacardium occidentale
AFKMEGEEVDKVFGK

SEQ ID NO: 4064 - protein, 15 aa, Anacardium occidentale
SRRGEGPKIWPFTEE

SEQ ID NO: 4065 - protein, 15 aa, Anacardium occidentale
MSRRGEGPKIWPFTE

SEQ ID NO: 4066 - protein, 15 aa, Anacardium occidentale
EKYYKEKKGREREHE

SEQ ID NO: 4067 - protein, 15 aa, Anacardium occidentale
MSVPFYNSRATKIAI

SEQ ID NO: 4068 - protein, 15 aa, Anacardium occidentale
RATKIAIVVSGEGCV

SEQ ID NO: 4069 - protein, 15 aa, Anacardium occidentale
QYDEQQKEQCVKECE

SEQ ID NO: 4070 - protein, 15 aa, Anacardium occidentale
PFTEESTGSFKLFKK

SEQ ID NO: 4071 - protein, 15 aa, Anacardium occidentale
ADSIFFVSWGRGTIT

SEQ ID NO: 4072 - protein, 15 aa, Anacardium occidentale
QCERQEGGQQKQLCR

SEQ ID NO: 4073 - protein, 15 aa, Anacardium occidentale
KIAIVVSGEGCVEIA

SEQ ID NO: 4074 - protein, 15 aa, Anacardium occidentale
CMRQCERQEGGQQKQ

SEQ ID NO: 4075 - protein, 15 aa, Anacardium occidentale
LSQCMRQCERQEGGQ

SEQ ID NO: 4076 - protein, 15 aa, Anacardium occidentale
KNIIKVMEKEAKELA

SEQ ID NO: 4077 - protein, 15 aa, Anacardium occidentale
LFKKDPSQSNKYGQL

SEQ ID NO: 4078 - protein, 15 aa, Anacardium occidentale
SIFFVSWGRGTITKI

SEQ ID NO: 4079 - protein, 15 aa, Anacardium occidentale
KIWPFTEESTGSFKL

SEQ ID NO: 4080 - protein, 15 aa, Anacardium occidentale
HPFATVASGNENLEI

SEQ ID NO: 4081 - protein, 15 aa, Anacardium occidentale
SRATKIAIVVSGEGC

SEQ ID NO: 4082 - protein, 15 aa, Anacardium occidentale
GRGTITKILENKRES

SEQ ID NO: 4083 - protein, 15 aa, Anacardium occidentale
NIRYTLAGKKNIIKV

SEQ ID NO: 4084 - protein, 15 aa, Anacardium occidentale
QGTIMKASKEQIRAM

SEQ ID NO: 4085 - protein, 15 aa, Anacardium occidentale
SQCMRQCERQEGGQQ

SEQ ID NO: 4086 - protein, 15 aa, Anacardium occidentale
RIRKDTVFIVPAGHP

SEQ ID NO: 4087 - protein, 15 aa, Anacardium occidentale
NDENEKLYLVQFLRP

SEQ ID NO: 4088 - protein, 15 aa, Anacardium occidentale
GKKNIIKVMEKEAKE

SEQ ID NO: 4089 - protein, 15 aa, Anacardium occidentale
IVVSGEGCVEIACPH

SEQ ID NO: 4090 - protein, 15 aa, Anacardium occidentale
RQEGGQQKQLCRFRC

SEQ ID NO: 4091 - protein, 15 aa, Anacardium occidentale
AVLVANPQAFVVPSH

SEQ ID NO: 4092 - protein, 15 aa, Anacardium occidentale
SGEGCVEIACPHLSS

SEQ ID NO: 4093 - protein, 15 aa, Anacardium occidentale
QRQYDEQQKEQCVKE

SEQ ID NO: 4094 - protein, 15 aa, Anacardium occidentale
FYNSRATKIAIVVSG

SEQ ID NO: 4095 - protein, 15 aa, Anacardium occidentale
EKEAKELAFKMEGEE

SEQ ID NO: 4096 - protein, 15 aa, Anacardium occidentale
VPAGHPFATVASGNE

SEQ ID NO: 4097 - protein, 15 aa, Anacardium occidentale
AEEEDENPYVFEDED

SEQ ID NO: 4098 - protein, 15 aa, Anacardium occidentale
EVNAEGNIRYTLAGK

SEQ ID NO: 4099 - protein, 15 aa, Anacardium occidentale
VCFEVNAEGNIRYTL

SEQ ID NO: 4100 - protein, 15 aa, Anacardium occidentale
NKRESINVRQGDIVS

SEQ ID NO: 4101 - protein, 15 aa, Anacardium occidentale
VSWGRGTITKILENK

SEQ ID NO: 4102 - protein, 15 aa, Anacardium occidentale
RAMSRRGEGPKIWPF

SEQ ID NO: 4103 - protein, 15 aa, Anacardium occidentale
NAEGNIRYTLAGKKN

SEQ ID NO: 4104 - protein, 15 aa, Anacardium occidentale
ALAKIDPELKQCKHQ

SEQ ID NO: 4105 - protein, 15 aa, Anacardium occidentale
ANPQAFVVPSHMDAD

SEQ ID NO: 4106 - protein, 15 aa, Anacardium occidentale
PVNLPGHFEVFHGPG

SEQ ID NO: 4107 - protein, 15 aa, Anacardium occidentale
ESTGSFKLFKKDPSQ

SEQ ID NO: 4108 - protein, 15 aa, Anacardium occidentale
KHLSQCMRQCERQEG

SEQ ID NO: 4109 - protein, 15 aa, Anacardium occidentale
SVPFYNSRATKIAIV

SEQ ID NO: 4110 - protein, 15 aa, Anacardium occidentale
RFRCQERYKKERGQH

SEQ ID NO: 4111 - protein, 15 aa, Anacardium occidentale
FGKQDEEFFFQGPEW

SEQ ID NO: 4112 - protein, 15 aa, Anacardium occidentale
ERIDYPPLEKLDMVV

SEQ ID NO: 4113 - protein, 15 aa, Anacardium occidentale
SYANITKGGMSVPFY

SEQ ID NO: 4114 - protein, 15 aa, Anacardium occidentale
VKTEQGKVVLLPKFT

SEQ ID NO: 4115 - protein, 15 aa, Anacardium occidentale
DPSQSNKYGQLFEAE

SEQ ID NO: 4116 - protein, 15 aa, Anacardium occidentale
YNSRATKIAIVVSGE

SEQ ID NO: 4117 - protein, 15 aa, Anacardium occidentale
EGNIRYTLAGKKNII

SEQ ID NO: 4118 - protein, 15 aa, Anacardium occidentale
VDKVFGKQDEEFFFQ

SEQ ID NO: 4119 - protein, 15 aa, Anacardium occidentale
SHMDADSIFFVSWGR

SEQ ID NO: 4120 - protein, 15 aa, Anacardium occidentale
EIACPHLSSSKSSHP

SEQ ID NO: 4121 - protein, 15 aa, Anacardium occidentale
IRYTLAGKKNIIKVM

SEQ ID NO: 4122 - protein, 15 aa, Anacardium occidentale
KLFKKDPSQSNKYGQ

SEQ ID NO: 4123 - protein, 15 aa, Anacardium occidentale
CERQEGGQQKQLCRF

SEQ ID NO: 4124 - protein, 15 aa, Anacardium occidentale
NIIKVMEKEAKELAF

SEQ ID NO: 4125 - protein, 15 aa, Anacardium occidentale
RKDTVFIVPAGHPFA

SEQ ID NO: 4126 - protein, 15 aa, Anacardium occidentale
EDEDFTTKVKTEQGK

SEQ ID NO: 4127 - protein, 15 aa, Anacardium occidentale
ESINVRQGDIVSISS

SEQ ID NO: 4128 - protein, 15 aa, Anacardium occidentale
KQLCRFRCQERYKKE

SEQ ID NO: 4129 - protein, 15 aa, Anacardium occidentale
KTEQGKVVLLPKFTQ

SEQ ID NO: 4130 - protein, 15 aa, Anacardium occidentale
VANPQAFVVPSHMDA

SEQ ID NO: 4131 - protein, 15 aa, Anacardium occidentale
LAVLVANPQAFVVPS

SEQ ID NO: 4132 - protein, 15 aa, Anacardium occidentale
SVLVLCLGFALAKID

SEQ ID NO: 4133 - protein, 15 aa, Anacardium occidentale
EGEEVDKVFGKQDEE

SEQ ID NO: 4134 - protein, 15 aa, Anacardium occidentale
LVSVLVLCLGFALAK

SEQ ID NO: 4135 - protein, 15 aa, Anacardium occidentale
SKEQIRAMSRRGEGP

SEQ ID NO: 4136 - protein, 15 aa, Anacardium occidentale
GNIRYTLAGKKNIIK

SEQ ID NO: 4137 - protein, 15 aa, Anacardium occidentale
EDENPYVFEDEDFTT

SEQ ID NO: 4138 - protein, 15 aa, Anacardium occidentale
FKMEGEEVDKVFGKQ

SEQ ID NO: 4139 - protein, 15 aa, Anacardium occidentale
QQKQLCRFRCQERYK

SEQ ID NO: 4140 - protein, 15 aa, Anacardium occidentale
QPNGLLLPQYSNAPQ

SEQ ID NO: 4141 - protein, 15 aa, Anacardium occidentale
IDRLDALEPDNRVEY

SEQ ID NO: 4142 - protein, 15 aa, Anacardium occidentale
AMTSPLAGRTSVLGG

SEQ ID NO: 4143 - protein, 15 aa, Anacardium occidentale
IQPNGLLLPQYSNAP

SEQ ID NO: 4144 - protein, 15 aa, Anacardium occidentale
PNHEQFRCAGVALVR

SEQ ID NO: 4145 - protein, 15 aa, Anacardium occidentale
QDECQIDRLDALEPD

SEQ ID NO: 4146 - protein, 15 aa, Anacardium occidentale
EETICTMRLKENIND

SEQ ID NO: 4147 - protein, 15 aa, Anacardium occidentale
GQRDNGIEETICTMR

SEQ ID NO: 4148 - protein, 15 aa, Anacardium occidentale
DRAMTSPLAGRTSVL

SEQ ID NO: 4149 - protein, 15 aa, Anacardium occidentale
DECQIDRLDALEPDN

SEQ ID NO: 4150 - protein, 15 aa, Anacardium occidentale
VQVVDNFGNRVFDGE

SEQ ID NO: 4151 - protein, 15 aa, Anacardium occidentale
NSLNLPILKWLQLSV

SEQ ID NO: 4152 - protein, 15 aa, Anacardium occidentale
FGNRVFDGEVREGQM

SEQ ID NO: 4153 - protein, 15 aa, Anacardium occidentale
NFGNRVFDGEVREGQ

SEQ ID NO: 4154 - protein, 15 aa, Anacardium occidentale
DRLDALEPDNRVEYE

SEQ ID NO: 4155 - protein, 15 aa, Anacardium occidentale
DNFGNRVFDGEVREG

SEQ ID NO: 4156 - protein, 15 aa, Anacardium occidentale
GIEETICTMRLKENI

SEQ ID NO: 4157 - protein, 15 aa, Anacardium occidentale
AGVALVRHTIQPNGL

SEQ ID NO: 4158 - protein, 15 aa, Anacardium occidentale
LGGMPEEVLANAFQI

SEQ ID NO: 4159 - protein, 15 aa, Anacardium occidentale
QYSNAPQLIYVVQGE

SEQ ID NO: 4160 - protein, 15 aa, Anacardium occidentale
RAMTSPLAGRTSVLG

SEQ ID NO: 4161 - protein, 15 aa, Anacardium occidentale
TICTMRLKENINDPA

SEQ ID NO: 4162 - protein, 15 aa, Anacardium occidentale
SPLAGRTSVLGGMPE

SEQ ID NO: 4163 - protein, 15 aa, Anacardium occidentale
EERFEWISFKTNDRA

SEQ ID NO: 4164 - protein, 15 aa, Anacardium occidentale
PLAGRTSVLGGMPEE

SEQ ID NO: 4165 - protein, 15 aa, Anacardium occidentale
GNRVFDGEVREGQML

SEQ ID NO: 4166 - protein, 15 aa, Anacardium occidentale
VVDNFGNRVFDGEVR

SEQ ID NO: 4167 - protein, 15 aa, Anacardium occidentale
RCAGVALVRHTIQPN

SEQ ID NO: 4168 - protein, 15 aa, Anacardium occidentale
VLGGMPEEVLANAFQ

SEQ ID NO: 4169 - protein, 15 aa, Anacardium occidentale
PNGLLLPQYSNAPQL

SEQ ID NO: 4170 - protein, 15 aa, Anacardium occidentale
FRCAGVALVRHTIQP

SEQ ID NO: 4171 - protein, 15 aa, Anacardium occidentale
IEETICTMRLKENIN

SEQ ID NO: 4172 - protein, 15 aa, Anacardium occidentale
NDRAMTSPLAGRTSV

SEQ ID NO: 4173 - protein, 15 aa, Anacardium occidentale
QQDECQIDRLDALEP

SEQ ID NO: 4174 - protein, 15 aa, Anacardium occidentale
ETICTMRLKENINDP

SEQ ID NO: 4175 - protein, 15 aa, Anacardium occidentale
GGMPEEVLANAFQIS

SEQ ID NO: 4176 - protein, 15 aa, Anacardium occidentale
NHEQFRCAGVALVRH

SEQ ID NO: 4177 - protein, 15 aa, Arachis hypogaea
RLKEGDVFIMPAAHP

SEQ ID NO: 4178 - protein, 15 aa, Arachis hypogaea
ADNILVIQQGQATVT

SEQ ID NO: 4179 - protein, 15 aa, Arachis hypogaea
GNNRKSFNLDEGHAL

SEQ ID NO: 4180 - protein, 15 aa, Arachis hypogaea
NREVRRYTARLKEGD

SEQ ID NO: 4181 - protein, 15 aa, Arachis hypogaea
GFSRNTLEAAFNAEF

SEQ ID NO: 4182 - protein, 15 aa, Arachis hypogaea
DLDMMLTCVEIKEGA

SEQ ID NO: 4183 - protein, 15 aa, Arachis hypogaea
QSSYLQGFSRNTLEA

SEQ ID NO: 4184 - protein, 15 aa, Arachis hypogaea
EEEGSNREVRRYTAR

SEQ ID NO: 4185 - protein, 15 aa, Arachis hypogaea
REGEPDLSNNFGKLF

SEQ ID NO: 4186 - protein, 15 aa, Arachis hypogaea
RDQSSYLQGFSRNTL

SEQ ID NO: 4187 - protein, 15 aa, Arachis hypogaea
SVSKKGSEEEGDITN

SEQ ID NO: 4188 - protein, 15 aa, Arachis hypogaea
RCTKLEYDPRCVYDP

SEQ ID NO: 4189 - protein, 15 aa, Arachis hypogaea
ESHFVSARPQSQSQS

SEQ ID NO: 4190 - protein, 15 aa, Arachis hypogaea
LAFPGSGEQVEKLIK

SEQ ID NO: 4191 - protein, 15 aa, Arachis hypogaea
GSNREVRRYTARLKE

SEQ ID NO: 4192 - protein, 15 aa, Arachis hypogaea
EAKPNTLVLPKHADA

SEQ ID NO: 4193 - protein, 15 aa, Arachis hypogaea
LTCVEIKEGALMLPH

SEQ ID NO: 4194 - protein, 15 aa, Arachis hypogaea
DQSSYLQGFSRNTLE

SEQ ID NO: 4195 - protein, 15 aa, Arachis hypogaea
SYLQGFSRNTLEAAF

SEQ ID NO: 4196 - protein, 15 aa, Arachis hypogaea
THAKSSPYQKKTENP

SEQ ID NO: 4197 - protein, 15 aa, Arachis hypogaea
LHLLGFGINAENNHR

SEQ ID NO: 4198 - protein, 15 aa, Arachis hypogaea
EGALMLPHFNSKAMV

SEQ ID NO: 4199 - protein, 15 aa, Arachis hypogaea
GFGINAENNHRIFLA

SEQ ID NO: 4200 - protein, 15 aa, Arachis hypogaea
QRLNAQRPDNRIESE

SEQ ID NO: 4201 - protein, 15 aa, Arachis hypogaea
DTNNNDNQLDQFPRR

SEQ ID NO: 4202 - protein, 15 aa, Arachis hypogaea
NLYRNALFVPHYNTN

SEQ ID NO: 4203 - protein, 15 aa, Arachis hypogaea
NLLILRWLGLSAEYG

SEQ ID NO: 4204 - protein, 15 aa, Arachis hypogaea
YRNALFVPHYNTNAH

SEQ ID NO: 4205 - protein, 15 aa, Arachis hypogaea
NQEFECAGVALSRLV

SEQ ID NO: 4206 - protein, 15 aa, Arachis hypogaea
TWNPNNQEFECAGVA

SEQ ID NO: 4207 - protein, 15 aa, Arachis hypogaea
ASSISFRQQPEENAC

SEQ ID NO: 4208 - protein, 15 aa, Arachis hypogaea
SRRRSLPYSPYSPHS

SEQ ID NO: 4209 - protein, 15 aa, Arachis hypogaea
TDVVAVSLTDTNNND

SEQ ID NO: 4210 - protein, 15 aa, Arachis hypogaea
SRRERAGQEEEDEGG

SEQ ID NO: 4211 - protein, 15 aa, Arachis hypogaea
QFPRRFNLAGNHEQE

SEQ ID NO: 4212 - protein, 15 aa, Arachis hypogaea
QQDSHQKVHRFNEGD

SEQ ID NO: 4213 - protein, 15 aa, Arachis hypogaea
GSRGGGNGIEETICT

SEQ ID NO: 4214 - protein, 15 aa, Arachis hypogaea
SNGNRVYDEELQEGH

SEQ ID NO: 4215 - protein, 15 aa, Arachis hypogaea
DLNLLILRWLGLSAE

SEQ ID NO: 4216 - protein, 15 aa, Arachis hypogaea
GVAFWLYNDHDTDVV

SEQ ID NO: 4217 - protein, 15 aa, Arachis hypogaea
EDQYEYHEQDGRRGR

SEQ ID NO: 4218 - protein, 15 aa, Arachis hypogaea
QEFECAGVALSRLVL

SEQ ID NO: 4219 - protein, 15 aa, Arachis hypogaea
IAVPTGVAFWLYNDH

SEQ ID NO: 4220 - protein, 15 aa, Arachis hypogaea
NHEQEFLRYQQQSRQ

SEQ ID NO: 4221 - protein, 15 aa, Arachis hypogaea
AFKTDSRPSIANFAG

SEQ ID NO: 4222 - protein, 15 aa, Arachis hypogaea
GRAHVQVVDSNGNRV

SEQ ID NO: 4223 - protein, 15 aa, Arachis hypogaea
ACQFQRLNAQRPDNR

SEQ ID NO: 4224 - protein, 15 aa, Arachis hypogaea
LNLLILRWLGLSAEY

SEQ ID NO: 4225 - protein, 15 aa, Arachis hypogaea
YSPYSPHSRPRREER

SEQ ID NO: 4226 - protein, 15 aa, Arachis hypogaea
VDSNGNRVYDEELQE

SEQ ID NO: 4227 - protein, 15 aa, Arachis hypogaea
VPHYNTNAHSIIYAL

SEQ ID NO: 4228 - protein, 15 aa, Arachis hypogaea
DVVAVSLTDTNNNDN

SEQ ID NO: 4229 - protein, 15 aa, Arachis hypogaea
NFAGENSFIDNLPEE

SEQ ID NO: 4230 - protein, 15 aa, Arachis hypogaea
RRERAGQEEEDEGGN

SEQ ID NO: 4231 - protein, 15 aa, Arachis hypogaea
PREQARQLKNNNPFK

SEQ ID NO: 4232 - protein, 15 aa, Arachis hypogaea
RRFNLAGNHEQEFLR

SEQ ID NO: 4233 - protein, 15 aa, Arachis hypogaea
FNEGDLIAVPTGVAF

SEQ ID NO: 4234 - protein, 15 aa, Arachis hypogaea
VQVVDSNGNRVYDEE

SEQ ID NO: 4235 - protein, 15 aa, Arachis hypogaea
RGYFGLIFPGCPSTY

SEQ ID NO: 4236 - protein, 15 aa, Arachis hypogaea
IEETICTACVKKNIG

SEQ ID NO: 4237 - protein, 15 aa, Arachis hypogaea
EEVVANSYGLPREQA

SEQ ID NO: 4238 - protein, 15 aa, Arachis hypogaea
LSAEYGNLYRNALFV

SEQ ID NO: 4239 - protein, 15 aa, Arachis hypogaea
AHVQVVDSNGNRVYD

SEQ ID NO: 4240 - protein, 15 aa, Arachis hypogaea
PNNQEFECAGVALSR

SEQ ID NO: 4241 - protein, 15 aa, Arachis hypogaea
VTVRGGLRILSPDGT

SEQ ID NO: 4242 - protein, 15 aa, Bertholletia excelsa
GRTSPLRGIPVGVLA

SEQ ID NO: 4243 - protein, 15 aa, Bertholletia excelsa
SDLNQLDQNPRHFFL

SEQ ID NO: 4244 - protein, 15 aa, Bertholletia excelsa
ADFYNPRAGRLTTVN

SEQ ID NO: 4245 - protein, 15 aa, Bertholletia excelsa
YNGLEETICSATFIQ

SEQ ID NO: 4246 - protein, 15 aa, Bertholletia excelsa
VALWCYNDGDEDLVT

SEQ ID NO: 4247 - protein, 15 aa, Bertholletia excelsa
AEADFYNPRAGRLTT

SEQ ID NO: 4248 - protein, 15 aa, Bertholletia excelsa
SPLRGIPVGVLANAY

SEQ ID NO: 4249 - protein, 15 aa, Bertholletia excelsa
NPRAGRLTTVNSLKV

SEQ ID NO: 4250 - protein, 15 aa, Bertholletia excelsa
QEGGGYNGLEETICS

SEQ ID NO: 4251 - protein, 15 aa, Bertholletia excelsa
CRIQRLTAQEPQYRL

SEQ ID NO: 4252 - protein, 15 aa, Carya illinoinensis
MACPHDVSSQSYEYK

SEQ ID NO: 4253 - protein, 15 aa, Carya illinoinensis
AMMVPHYNSKATVVV

SEQ ID NO: 4254 - protein, 15 aa, Carya illinoinensis
EGTGRFEMACPHDVS

SEQ ID NO: 4255 - protein, 15 aa, Carya illinoinensis
MMVPHYNSKATVVVY

SEQ ID NO: 4256 - protein, 15 aa, Carya illinoinensis
LQPVNNPGQFREYYA

SEQ ID NO: 4257 - protein, 15 aa, Carya illinoinensis
VEGTGRFEMACPHDV

SEQ ID NO: 4258 - protein, 15 aa, Carya illinoinensis
GAMMVPHYNSKATVV

SEQ ID NO: 4259 - protein, 15 aa, Carya illinoinensis
QPVNNPGQFREYYAA

SEQ ID NO: 4260 - protein, 15 aa, Carya illinoinensis
RGAMMVPHYNSKATV

SEQ ID NO: 4261 - protein, 15 aa, Carya illinoinensis
PVNNPGQFREYYAAG

SEQ ID NO: 4262 - protein, 15 aa, Carya illinoinensis
SQNENLRLVGFGING

SEQ ID NO: 4263 - protein, 15 aa, Carya illinoinensis
ACPHDVSSQSYEYKG

SEQ ID NO: 4264 - protein, 15 aa, Carya illinoinensis
FEMACPHDVSSQSYE

SEQ ID NO: 4265 - protein, 15 aa, Carya illinoinensis
NQLEREAKELSFNMP

SEQ ID NO: 4266 - protein, 15 aa, Carya illinoinensis
EMACPHDVSSQSYEY

SEQ ID NO: 4267 - protein, 15 aa, Carya illinoinensis
NYAEIKRGAMMVPHY

SEQ ID NO: 4268 - protein, 15 aa, Carya illinoinensis
FLLDTHNNANQLDQN

SEQ ID NO: 4269 - protein, 15 aa, Carya illinoinensis
IFLLDTHNNANQLDQ

SEQ ID NO: 4270 - protein, 15 aa, Carya illinoinensis
TVNSHNLPILRWLQL

SEQ ID NO: 4271 - protein, 15 aa, Carya illinoinensis
VNSHNLPILRWLQLS

SEQ ID NO: 4272 - protein, 15 aa, Carya illinoinensis
HYSNAPQLVYIARGR

SEQ ID NO: 4273 - protein, 15 aa, Carya illinoinensis
VAIFLLDTHNNANQL

SEQ ID NO: 4274 - protein, 15 aa, Carya illinoinensis
AIFLLDTHNNANQLD

SEQ ID NO: 4275 - protein, 15 aa, Corylus avellana
EDPELKKCKHKCRDE

SEQ ID NO: 4276 - protein, 15 aa, Corylus avellana
NNLQVLCFEVNAHGN

SEQ ID NO: 4277 - protein, 15 aa, Corylus avellana
LQVLCFEVNAHGNSR

SEQ ID NO: 4278 - protein, 15 aa, Corylus avellana
ANITKGSMAGPYYNS

SEQ ID NO: 4279 - protein, 15 aa, Corylus avellana
YNSRATKISVVVEGE

SEQ ID NO: 4280 - protein, 15 aa, Corylus avellana
ELKKCKHKCRDERQF

SEQ ID NO: 4281 - protein, 15 aa, Corylus avellana
TPVYMINRDENEKLF

SEQ ID NO: 4282 - protein, 15 aa, Corylus avellana
DPELKKCKHKCRDER

SEQ ID NO: 4283 - protein, 15 aa, Corylus avellana
PHLSSSSGSYQKISA

SEQ ID NO: 4284 - protein, 15 aa, Corylus avellana
EGFFEMACPHLSSSS

SEQ ID NO: 4285 - protein, 15 aa, Corylus avellana
PELKKCKHKCRDERQ

SEQ ID NO: 4286 - protein, 15 aa, Corylus avellana
VVEGEGFFEMACPHL

SEQ ID NO: 4287 - protein, 15 aa, Corylus avellana
NLQVLCFEVNAHGNS

SEQ ID NO: 4288 - protein, 15 aa, Corylus avellana
SRATKISVVVEGEGF

SEQ ID NO: 4289 - protein, 15 aa, Corylus avellana
VEGEGFFEMACPHLS

SEQ ID NO: 4290 - protein, 15 aa, Corylus avellana
QDLDLMVSFANITKG

SEQ ID NO: 4291 - protein, 15 aa, Corylus avellana
EGEGFFEMACPHLSS

SEQ ID NO: 4292 - protein, 15 aa, Corylus avellana
LQDLDLMVSFANITK

SEQ ID NO: 4293 - protein, 15 aa, Corylus avellana
ENEKLFIVKILQPVS

SEQ ID NO: 4294 - protein, 15 aa, Corylus avellana
HWCYNDGDSPVVTVS

SEQ ID NO: 4295 - protein, 15 aa, Corylus avellana
LPAGVAHWCYNDGDS

SEQ ID NO: 4296 - protein, 15 aa, Corylus avellana
NTVNSNTLPVLRWLQ

SEQ ID NO: 4297 - protein, 15 aa, Corylus avellana
SREEARRLKYNRQET

SEQ ID NO: 4298 - protein, 15 aa, Corylus avellana
ARVQVVDDNGNTVFD

SEQ ID NO: 4299 - protein, 15 aa, Corylus avellana
RAESEGFEWVAFKTN

SEQ ID NO: 4300 - protein, 15 aa, Corylus avellana
PLAGRTSAIRALPDD

SEQ ID NO: 4301 - protein, 15 aa, Corylus avellana
EEARRLKYNRQETTL

SEQ ID NO: 4302 - protein, 15 aa, Corylus avellana
LDRLNALEPTNRIEA

SEQ ID NO: 4303 - protein, 15 aa, Corylus avellana
GRARVQVVDDNGNTV

SEQ ID NO: 4304 - protein, 15 aa, Corylus avellana
LPDDVLANAFQISRE

SEQ ID NO: 4305 - protein, 15 aa, Corylus avellana
FEWVAFKTNDNAQIS

SEQ ID NO: 4306 - protein, 15 aa, Corylus avellana
REEARRLKYNRQETT

SEQ ID NO: 4307 - protein, 15 aa, Corylus avellana
NLDRLNALEPTNRIE

SEQ ID NO: 4308 - protein, 15 aa, Corylus avellana
ISREEARRLKYNRQE

SEQ ID NO: 4309 - protein, 15 aa, Corylus avellana
ALPAGVAHWCYNDGD

SEQ ID NO: 4310 - protein, 15 aa, Corylus avellana
VNGFEETICSLRLRE

SEQ ID NO: 4311 - protein, 15 aa, Corylus avellana
GRDVNGFEETICSLR

SEQ ID NO: 4312 - protein, 15 aa, Corylus avellana
VGRINTVNSNTLPVL

SEQ ID NO: 4313 - protein, 15 aa, Fagopyrum esculentum
VLANSYDISTKEAFR

SEQ ID NO: 4314 - protein, 15 aa, Fagopyrum esculentum
VELKNDDNAITSPIA

SEQ ID NO: 4315 - protein, 15 aa, Fagopyrum esculentum
FDDNVQRGQILVVPQ

SEQ ID NO: 4316 - protein, 15 aa, Fagopyrum esculentum
KNDDNAITSPIAGKT

SEQ ID NO: 4317 - protein, 15 aa, Fagopyrum esculentum
EGRSVFDDNVQRGQI

SEQ ID NO: 4318 - protein, 15 aa, Fagopyrum esculentum
NVNRPSRADVFNPRA

SEQ ID NO: 4319 - protein, 15 aa, Fagopyrum esculentum
SALYVTRGEGRVQVV

SEQ ID NO: 4320 - protein, 15 aa, Fagopyrum esculentum
QAFCNLKFKQNVNRP

SEQ ID NO: 4321 - protein, 15 aa, Fagopyrum esculentum
ANSYDISTKEAFRLK

SEQ ID NO: 4322 - protein, 15 aa, Fagopyrum esculentum
SGRSNGLEQAFCNLK

SEQ ID NO: 4323 - protein, 15 aa, Fagopyrum esculentum
NLPILEFIQLSAQHV

SEQ ID NO: 4324 - protein, 15 aa, Fagopyrum esculentum
REGLEWVELKNDDNA

SEQ ID NO: 4325 - protein, 15 aa, Fagopyrum esculentum
NDDNAITSPIAGKTS

SEQ ID NO: 4326 - protein, 15 aa, Fagopyrum esculentum
AHSALYVTRGEGRVQ

SEQ ID NO: 4327 - protein, 15 aa, Fagopyrum esculentum
RSNGLEQAFCNLKFK

SEQ ID NO: 4328 - protein, 15 aa, Fagopyrum esculentum
VFDDNVQRGQILVVP

SEQ ID NO: 4329 - protein, 15 aa, Fagopyrum esculentum
IAGKTSVLRAIPVEV

SEQ ID NO: 4330 - protein, 15 aa, Fagopyrum esculentum
LEFIQLSAQHVVLYK

SEQ ID NO: 4331 - protein, 15 aa, Fagopyrum esculentum
LKNGRQEVEVFLPFQ

SEQ ID NO: 4332 - protein, 15 aa, Fagopyrum esculentum
GFAVVLKAGREGLEW

SEQ ID NO: 4333 - protein, 15 aa, Fagopyrum esculentum
GLEQAFCNLKFKQNV

SEQ ID NO: 4334 - protein, 15 aa, Fagopyrum esculentum
DISTKEAFRLKNGRQ

SEQ ID NO: 4335 - protein, 15 aa, Fagopyrum esculentum
VLKAGREGLEWVELK

SEQ ID NO: 4336 - protein, 15 aa, Fagopyrum esculentum
NPRAGRINTVNSNNL

SEQ ID NO: 4337 - protein, 15 aa, Fagopyrum esculentum
QRGQILVVPQGFAVV

SEQ ID NO: 4338 - protein, 15 aa, Fagopyrum esculentum
SVFDDNVQRGQILVV

SEQ ID NO: 4339 - protein, 15 aa, Fagopyrum esculentum
EAFRLKNGRQEVEVF

SEQ ID NO: 4340 - protein, 15 aa, Fagopyrum esculentum
GDEGRSVFDDNVQRG

SEQ ID NO: 4341 - protein, 15 aa, Fagopyrum esculentum
AILGPRWNLNAHSAL

SEQ ID NO: 4342 - protein, 15 aa, Fagopyrum esculentum
NLKFKQNVNRPSRAD

SEQ ID NO: 4343 - protein, 15 aa, Fagopyrum esculentum
EQAFCNLKFKQNVNR

SEQ ID NO: 4344 - protein, 15 aa, Fagopyrum esculentum
NAHSALYVTRGEGRV

SEQ ID NO: 4345 - protein, 15 aa, Fagopyrum esculentum
ILVVPQGFAVVLKAG

SEQ ID NO: 4346 - protein, 15 aa, Fagopyrum esculentum
TSPIAGKTSVLRAIP

SEQ ID NO: 4347 - protein, 15 aa, Fagopyrum esculentum
RVQVVGDEGRSVFDD

SEQ ID NO: 4348 - protein, 15 aa, Fagopyrum esculentum
GSGRSNGLEQAFCNL

SEQ ID NO: 4349 - protein, 15 aa, Fagopyrum esculentum
PSRADVFNPRAGRIN

SEQ ID NO: 4350 - protein, 15 aa, Fagopyrum esculentum
PVEVLANSYDISTKE

SEQ ID NO: 4351 - protein, 15 aa, Fagopyrum esculentum
NSYDISTKEAFRLKN

SEQ ID NO: 4352 - protein, 15 aa, Fagopyrum esculentum
RLKNGRQEVEVFLPF

SEQ ID NO: 4353 - protein, 15 aa, Fagopyrum esculentum
NSNNLPILEFIQLSA

SEQ ID NO: 4354 - protein, 15 aa, Fagopyrum esculentum
RSVFDDNVQRGQILV

SEQ ID NO: 4355 - protein, 15 aa, Fagopyrum esculentum
GRSNGLEQAFCNLKF

SEQ ID NO: 4356 - protein, 15 aa, Fagopyrum esculentum
QGFAVVLKAGREGLE

SEQ ID NO: 4357 - protein, 15 aa, Fagopyrum esculentum
GRSVFDDNVQRGQIL

SEQ ID NO: 4358 - protein, 15 aa, Fagopyrum esculentum
EGRVQVVGDEGRSVF

SEQ ID NO: 4359 - protein, 15 aa, Fagopyrum esculentum
PRWNLNAHSALYVTR

SEQ ID NO: 4360 - protein, 15 aa, Fagopyrum esculentum
GREGLEWVELKNDDN

SEQ ID NO: 4361 - protein, 15 aa, Fagopyrum esculentum
TVNSNNLPILEFIQL

SEQ ID NO: 4362 - protein, 15 aa, Fagopyrum esculentum
NAITSPIAGKTSVLR

SEQ ID NO: 4363 - protein, 15 aa, Fagopyrum esculentum
CNLKFKQNVNRPSRA

SEQ ID NO: 4364 - protein, 15 aa, Fagopyrum esculentum
SPIAGKTSVLRAIPV

SEQ ID NO: 4365 - protein, 15 aa, Fagopyrum esculentum
DDNVQRGQILVVPQG

SEQ ID NO: 4366 - protein, 15 aa, Fagopyrum esculentum
LEQAFCNLKFKQNVN

SEQ ID NO: 4367 - protein, 15 aa, Fagopyrum esculentum
NGLEQAFCNLKFKQN

SEQ ID NO: 4368 - protein, 15 aa, Fagopyrum esculentum
ALYVTRGEGRVQVVG

SEQ ID NO: 4369 - protein, 15 aa, Fagopyrum esculentum
STKEAFRLKNGRQEV

SEQ ID NO: 4370 - protein, 15 aa, Fagopyrum esculentum
AGREGLEWVELKNDD

SEQ ID NO: 4371 - protein, 13 aa, Fagopyrum esculentum
LPFQSRDEKERER

SEQ ID NO: 4372 - protein, 15 aa, Fagopyrum esculentum
LKAGREGLEWVELKN

SEQ ID NO: 4373 - protein, 15 aa, Fagopyrum esculentum
DDNAITSPIAGKTSV

SEQ ID NO: 4374 - protein, 15 aa, Fagopyrum esculentum
EWVELKNDDNAITSP

SEQ ID NO: 4375 - protein, 15 aa, Fagopyrum esculentum
LVVPQGFAVVLKAGR

SEQ ID NO: 4376 - protein, 15 aa, Fagopyrum esculentum
LKFKQNVNRPSRADV

SEQ ID NO: 4377 - protein, 15 aa, Fagopyrum esculentum
PGCPETFQSESEFEY

SEQ ID NO: 4378 - protein, 15 aa, Fagopyrum esculentum
QEVEVFLPFQSRDEK

SEQ ID NO: 4379 - protein, 15 aa, Fagopyrum esculentum
LYVTRGEGRVQVVGD

SEQ ID NO: 4380 - protein, 15 aa, Fagopyrum esculentum
AFCNLKFKQNVNRPS

SEQ ID NO: 4381 - protein, 15 aa, Fagopyrum esculentum
ILEFIQLSAQHVVLY

SEQ ID NO: 4382 - protein, 15 aa, Fagopyrum esculentum
TKEAFRLKNGRQEVE

SEQ ID NO: 4383 - protein, 15 aa, Fagopyrum esculentum
VTRGEGRVQVVGDEG

SEQ ID NO: 4384 - protein, 15 aa, Fagopyrum esculentum
VLRAIPVEVLANSYD

SEQ ID NO: 4385 - protein, 15 aa, Fagopyrum esculentum
RADVFNPRAGRINTV

SEQ ID NO: 4386 - protein, 15 aa, Fagopyrum esculentum
LNAHSALYVTRGEGR

SEQ ID NO: 4387 - protein, 15 aa, Fagopyrum esculentum
RAGRINTVNSNNLPI

SEQ ID NO: 4388 - protein, 15 aa, Fagopyrum esculentum
VVLKAGREGLEWVEL

SEQ ID NO: 4389 - protein, 15 aa, Fagopyrum esculentum
KFKQNVNRPSRADVF

SEQ ID NO: 4390 - protein, 15 aa, Fagopyrum esculentum
LRAIPVEVLANSYDI

SEQ ID NO: 4391 - protein, 15 aa, Fagopyrum esculentum
WVELKNDDNAITSPI

SEQ ID NO: 4392 - protein, 15 aa, Fagopyrum esculentum
ITSPIAGKTSVLRAI

SEQ ID NO: 4393 - protein, 15 aa, Fagopyrum esculentum
ADVFNPRAGRINTVN

SEQ ID NO: 4394 - protein, 15 aa, Fagopyrum esculentum
KNGRQEVEVFLPFQS

SEQ ID NO: 4395 - protein, 15 aa, Fagopyrum esculentum
GPRWNLNAHSALYVT

SEQ ID NO: 4396 - protein, 15 aa, Fagopyrum esculentum
SNGLEQAFCNLKFKQ

SEQ ID NO: 4397 - protein, 15 aa, Fagopyrum esculentum
TRGEGRVQVVGDEGR

SEQ ID NO: 4398 - protein, 15 aa, Fagopyrum esculentum
AGKTSVLRAIPVEVL

SEQ ID NO: 4399 - protein, 15 aa, Fagopyrum esculentum
GEGRVQVVGDEGRSV

SEQ ID NO: 4400 - protein, 15 aa, Fagopyrum esculentum
GLEWVELKNDDNAIT

SEQ ID NO: 4401 - protein, 15 aa, Fagopyrum esculentum
VVPQGFAVVLKAGRE

SEQ ID NO: 4402 - protein, 15 aa, Fagopyrum esculentum
RQEVEVFLPFQSRDE

SEQ ID NO: 4403 - protein, 15 aa, Fagopyrum esculentum
NGRQEVEVFLPFQSR

SEQ ID NO: 4404 - protein, 15 aa, Fagopyrum esculentum
HSALYVTRGEGRVQV

SEQ ID NO: 4405 - protein, 15 aa, Fagopyrum esculentum
NRPSRADVFNPRAGR

SEQ ID NO: 4406 - protein, 15 aa, Fagopyrum esculentum
LPILEFIQLSAQHVV

SEQ ID NO: 4407 - protein, 14 aa, Fagopyrum esculentum
FLPFQSRDEKERER

SEQ ID NO: 4408 - protein, 15 aa, Fagopyrum esculentum
FRLKNGRQEVEVFLP

SEQ ID NO: 4409 - protein, 15 aa, Fagopyrum esculentum
NAILGPRWNLNAHSA

SEQ ID NO: 4410 - protein, 15 aa, Fagopyrum esculentum
DEGRSVFDDNVQRGQ

SEQ ID NO: 4411 - protein, 15 aa, Fagopyrum esculentum
DVFNPRAGRINTVNS

SEQ ID NO: 4412 - protein, 15 aa, Fagopyrum esculentum
NNLPILEFIQLSAQH

SEQ ID NO: 4413 - protein, 15 aa, Fagopyrum esculentum
VFNPRAGRINTVNSN

SEQ ID NO: 4414 - protein, 15 aa, Fagopyrum esculentum
VFLPFQSRDEKERER

SEQ ID NO: 4415 - protein, 15 aa, Fagopyrum esculentum
EGLEWVELKNDDNAI

SEQ ID NO: 4416 - protein, 15 aa, Fagopyrum esculentum
ILGPRWNLNAHSALY

SEQ ID NO: 4417 - protein, 15 aa, Fagopyrum esculentum
AITSPIAGKTSVLRA

SEQ ID NO: 4418 - protein, 15 aa, Fagopyrum esculentum
LGPRWNLNAHSALYV

SEQ ID NO: 4419 - protein, 15 aa, Fagopyrum esculentum
GRVQVVGDEGRSVFD

SEQ ID NO: 4420 - protein, 15 aa, Fagopyrum esculentum
HVVLYKNAILGPRWN

SEQ ID NO: 4421 - protein, 15 aa, Fagopyrum esculentum
KEAFRLKNGRQEVEV

SEQ ID NO: 4422 - protein, 15 aa, Fagopyrum esculentum
LYKNAILGPRWNLNA

SEQ ID NO: 4423 - protein, 15 aa, Fagopyrum esculentum
WNLNAHSALYVTRGE

SEQ ID NO: 4424 - protein, 15 aa, Fagopyrum esculentum
NLNAHSALYVTRGEG

SEQ ID NO: 4425 - protein, 15 aa, Fagopyrum esculentum
PILEFIQLSAQHVVL

SEQ ID NO: 4426 - protein, 15 aa, Fagopyrum esculentum
NVQRGQILVVPQGFA

SEQ ID NO: 4427 - protein, 15 aa, Fagopyrum esculentum
FAVVLKAGREGLEWV

SEQ ID NO: 4428 - protein, 15 aa, Fagopyrum esculentum
AIPVEVLANSYDIST

SEQ ID NO: 4429 - protein, 15 aa, Fagopyrum esculentum
VPQGFAVVLKAGREG

SEQ ID NO: 4430 - protein, 15 aa, Fagopyrum esculentum
EFIQLSAQHVVLYKN

SEQ ID NO: 4431 - protein, 15 aa, Fagopyrum esculentum
RPSRADVFNPRAGRI

SEQ ID NO: 4432 - protein, 15 aa, Fagopyrum esculentum
DNAITSPIAGKTSVL

SEQ ID NO: 4433 - protein, 15 aa, Fagopyrum esculentum
AQHVVLYKNAILGPR

SEQ ID NO: 4434 - protein, 15 aa, Fagopyrum esculentum
PQGFAVVLKAGREGL

SEQ ID NO: 4435 - protein, 15 aa, Fagopyrum esculentum
EVLANSYDISTKEAF

SEQ ID NO: 4436 - protein, 15 aa, Fagopyrum esculentum
GRQEVEVFLPFQSRD

SEQ ID NO: 4437 - protein, 15 aa, Fagopyrum esculentum
KQNVNRPSRADVFNP

SEQ ID NO: 4438 - protein, 15 aa, Fagopyrum esculentum
LEWVELKNDDNAITS

SEQ ID NO: 4439 - protein, 15 aa, Fagopyrum esculentum
KAGREGLEWVELKND

SEQ ID NO: 4440 - protein, 15 aa, Fagopyrum esculentum
QNVNRPSRADVFNPR

SEQ ID NO: 4441 - protein, 15 aa, Fagopyrum esculentum
AVVLKAGREGLEWVE

SEQ ID NO: 4442 - protein, 15 aa, Fagopyrum esculentum
VEVLANSYDISTKEA

SEQ ID NO: 4443 - protein, 15 aa, Fagopyrum esculentum
IPVEVLANSYDISTK

SEQ ID NO: 4444 - protein, 15 aa, Fagopyrum esculentum
GGSGRSNGLEQAFCN

SEQ ID NO: 4445 - protein, 15 aa, Fagopyrum esculentum
ELKNDDNAITSPIAG

SEQ ID NO: 4446 - protein, 15 aa, Fagopyrum esculentum
RGEGRVQVVGDEGRS

SEQ ID NO: 4447 - protein, 15 aa, Fagopyrum esculentum
YDISTKEAFRLKNGR

SEQ ID NO: 4448 - protein, 15 aa, Fagopyrum tataricum
VLANSYDISTKEAFR

SEQ ID NO: 4449 - protein, 15 aa, Fagopyrum tataricum
VELKNDDNAITSPIA

SEQ ID NO: 4450 - protein, 15 aa, Fagopyrum tataricum
FDDNVQRGQILVVPQ

SEQ ID NO: 4451 - protein, 15 aa, Fagopyrum tataricum
KNDDNAITSPIAGKT

SEQ ID NO: 4452 - protein, 15 aa, Fagopyrum tataricum
EGRSVFDDNVQRGQI

SEQ ID NO: 4453 - protein, 15 aa, Fagopyrum tataricum
NVNRPSRADVFNPRA

SEQ ID NO: 4454 - protein, 15 aa, Fagopyrum tataricum
SALYVTRGEGRVQVV

SEQ ID NO: 4455 - protein, 15 aa, Fagopyrum tataricum
QAFCNLKFKQNVNRP

SEQ ID NO: 4456 - protein, 15 aa, Fagopyrum tataricum
ANSYDISTKEAFRLK

SEQ ID NO: 4457 - protein, 15 aa, Fagopyrum tataricum
SGRSNGLEQAFCNLK

SEQ ID NO: 4458 - protein, 15 aa, Fagopyrum tataricum
NLPILEFIQLSAQHV

SEQ ID NO: 4459 - protein, 15 aa, Fagopyrum tataricum
REGLEWVELKNDDNA

SEQ ID NO: 4460 - protein, 15 aa, Fagopyrum tataricum
NDDNAITSPIAGKTS

SEQ ID NO: 4461 - protein, 15 aa, Fagopyrum tataricum
AHSALYVTRGEGRVQ

SEQ ID NO: 4462 - protein, 14 aa, Fagopyrum tataricum
LPFQSRDEKERERF

SEQ ID NO: 4463 - protein, 15 aa, Fagopyrum tataricum
RSNGLEQAFCNLKFK

SEQ ID NO: 4464 - protein, 15 aa, Fagopyrum tataricum
VFDDNVQRGQILVVP

SEQ ID NO: 4465 - protein, 15 aa, Fagopyrum tataricum
IAGKTSVLRAIPVEV

SEQ ID NO: 4466 - protein, 15 aa, Fagopyrum tataricum
LEFIQLSAQHVVLYK

SEQ ID NO: 4467 - protein, 15 aa, Fagopyrum tataricum
LKNGRQEVEVFLPFQ

SEQ ID NO: 4468 - protein, 15 aa, Fagopyrum tataricum
GFAVVLKAGREGLEW

SEQ ID NO: 4469 - protein, 15 aa, Fagopyrum tataricum
GLEQAFCNLKFKQNV

SEQ ID NO: 4470 - protein, 15 aa, Fagopyrum tataricum
DISTKEAFRLKNGRQ

SEQ ID NO: 4471 - protein, 15 aa, Fagopyrum tataricum
VLKAGREGLEWVELK

SEQ ID NO: 4472 - protein, 15 aa, Fagopyrum tataricum
NPRAGRINTVNSNNL

SEQ ID NO: 4473 - protein, 15 aa, Fagopyrum tataricum
QRGQILVVPQGFAVV

SEQ ID NO: 4474 - protein, 15 aa, Fagopyrum tataricum
SVFDDNVQRGQILVV

SEQ ID NO: 4475 - protein, 15 aa, Fagopyrum tataricum
EAFRLKNGRQEVEVF

SEQ ID NO: 4476 - protein, 15 aa, Fagopyrum tataricum
GDEGRSVFDDNVQRG

SEQ ID NO: 4477 - protein, 15 aa, Fagopyrum tataricum
AILGPRWNLNAHSAL

SEQ ID NO: 4478 - protein, 15 aa, Fagopyrum tataricum
NLKFKQNVNRPSRAD

SEQ ID NO: 4479 - protein, 15 aa, Fagopyrum tataricum
EQAFCNLKFKQNVNR

SEQ ID NO: 4480 - protein, 15 aa, Fagopyrum tataricum
NAHSALYVTRGEGRV

SEQ ID NO: 4481 - protein, 15 aa, Fagopyrum tataricum
ILVVPQGFAVVLKAG

SEQ ID NO: 4482 - protein, 15 aa, Fagopyrum tataricum
TSPIAGKTSVLRAIP

SEQ ID NO: 4483 - protein, 15 aa, Fagopyrum tataricum
RVQVVGDEGRSVFDD

SEQ ID NO: 4484 - protein, 15 aa, Fagopyrum tataricum
GSGRSNGLEQAFCNL

SEQ ID NO: 4485 - protein, 15 aa, Fagopyrum tataricum
PSRADVFNPRAGRIN

SEQ ID NO: 4486 - protein, 15 aa, Fagopyrum tataricum
PVEVLANSYDISTKE

SEQ ID NO: 4487 - protein, 15 aa, Fagopyrum tataricum
NSYDISTKEAFRLKN

SEQ ID NO: 4488 - protein, 15 aa, Fagopyrum tataricum
RLKNGRQEVEVFLPF

SEQ ID NO: 4489 - protein, 15 aa, Fagopyrum tataricum
NSNNLPILEFIQLSA

SEQ ID NO: 4490 - protein, 15 aa, Fagopyrum tataricum
RSVFDDNVQRGQILV

SEQ ID NO: 4491 - protein, 15 aa, Fagopyrum tataricum
GRSNGLEQAFCNLKF

SEQ ID NO: 4492 - protein, 15 aa, Fagopyrum tataricum
QGFAVVLKAGREGLE

SEQ ID NO: 4493 - protein, 15 aa, Fagopyrum tataricum
GRSVFDDNVQRGQIL

SEQ ID NO: 4494 - protein, 15 aa, Fagopyrum tataricum
EGRVQVVGDEGRSVF

SEQ ID NO: 4495 - protein, 15 aa, Fagopyrum tataricum
PRWNLNAHSALYVTR

SEQ ID NO: 4496 - protein, 15 aa, Fagopyrum tataricum
GREGLEWVELKNDDN

SEQ ID NO: 4497 - protein, 15 aa, Fagopyrum tataricum
TVNSNNLPILEFIQL

SEQ ID NO: 4498 - protein, 15 aa, Fagopyrum tataricum
NAITSPIAGKTSVLR

SEQ ID NO: 4499 - protein, 15 aa, Fagopyrum tataricum
CNLKFKQNVNRPSRA

SEQ ID NO: 4500 - protein, 15 aa, Fagopyrum tataricum
SPIAGKTSVLRAIPV

SEQ ID NO: 4501 - protein, 15 aa, Fagopyrum tataricum
DDNVQRGQILVVPQG

SEQ ID NO: 4502 - protein, 15 aa, Fagopyrum tataricum
LEQAFCNLKFKQNVN

SEQ ID NO: 4503 - protein, 15 aa, Fagopyrum tataricum
NGLEQAFCNLKFKQN

SEQ ID NO: 4504 - protein, 15 aa, Fagopyrum tataricum
ALYVTRGEGRVQVVG

SEQ ID NO: 4505 - protein, 15 aa, Fagopyrum tataricum
STKEAFRLKNGRQEV

SEQ ID NO: 4506 - protein, 15 aa, Fagopyrum tataricum
AGREGLEWVELKNDD

SEQ ID NO: 4507 - protein, 15 aa, Fagopyrum tataricum
LKAGREGLEWVELKN

SEQ ID NO: 4508 - protein, 15 aa, Fagopyrum tataricum
DDNAITSPIAGKTSV

SEQ ID NO: 4509 - protein, 15 aa, Fagopyrum tataricum
EWVELKNDDNAITSP

SEQ ID NO: 4510 - protein, 15 aa, Fagopyrum tataricum
LVVPQGFAVVLKAGR

SEQ ID NO: 4511 - protein, 15 aa, Fagopyrum tataricum
LKFKQNVNRPSRADV

SEQ ID NO: 4512 - protein, 15 aa, Fagopyrum tataricum
PGCPETFQSESEFEY

SEQ ID NO: 4513 - protein, 15 aa, Fagopyrum tataricum
QEVEVFLPFQSRDEK

SEQ ID NO: 4514 - protein, 15 aa, Fagopyrum tataricum
LYVTRGEGRVQVVGD

SEQ ID NO: 4515 - protein, 15 aa, Fagopyrum tataricum
AFCNLKFKQNVNRPS

SEQ ID NO: 4516 - protein, 15 aa, Fagopyrum tataricum
ILEFIQLSAQHVVLY

SEQ ID NO: 4517 - protein, 15 aa, Fagopyrum tataricum
TKEAFRLKNGRQEVE

SEQ ID NO: 4518 - protein, 15 aa, Fagopyrum tataricum
VTRGEGRVQVVGDEG

SEQ ID NO: 4519 - protein, 15 aa, Fagopyrum tataricum
VLRAIPVEVLANSYD

SEQ ID NO: 4520 - protein, 15 aa, Fagopyrum tataricum
RADVFNPRAGRINTV

SEQ ID NO: 4521 - protein, 15 aa, Fagopyrum tataricum
LNAHSALYVTRGEGR

SEQ ID NO: 4522 - protein, 15 aa, Fagopyrum tataricum
RAGRINTVNSNNLPI

SEQ ID NO: 4523 - protein, 15 aa, Fagopyrum tataricum
VVLKAGREGLEWVEL

SEQ ID NO: 4524 - protein, 15 aa, Fagopyrum tataricum
KFKQNVNRPSRADVF

SEQ ID NO: 4525 - protein, 15 aa, Fagopyrum tataricum
LRAIPVEVLANSYDI

SEQ ID NO: 4526 - protein, 15 aa, Fagopyrum tataricum
WVELKNDDNAITSPI

SEQ ID NO: 4527 - protein, 15 aa, Fagopyrum tataricum
ITSPIAGKTSVLRAI

SEQ ID NO: 4528 - protein, 15 aa, Fagopyrum tataricum
ADVFNPRAGRINTVN

SEQ ID NO: 4529 - protein, 15 aa, Fagopyrum tataricum
KNGRQEVEVFLPFQS

SEQ ID NO: 4530 - protein, 15 aa, Fagopyrum tataricum
GPRWNLNAHSALYVT

SEQ ID NO: 4531 - protein, 15 aa, Fagopyrum tataricum
SNGLEQAFCNLKFKQ

SEQ ID NO: 4532 - protein, 15 aa, Fagopyrum tataricum
TRGEGRVQVVGDEGR

SEQ ID NO: 4533 - protein, 15 aa, Fagopyrum tataricum
AGKTSVLRAIPVEVL

SEQ ID NO: 4534 - protein, 15 aa, Fagopyrum tataricum
GEGRVQVVGDEGRSV

SEQ ID NO: 4535 - protein, 15 aa, Fagopyrum tataricum
GLEWVELKNDDNAIT

SEQ ID NO: 4536 - protein, 15 aa, Fagopyrum tataricum
VVPQGFAVVLKAGRE

SEQ ID NO: 4537 - protein, 15 aa, Fagopyrum tataricum
RQEVEVFLPFQSRDE

SEQ ID NO: 4538 - protein, 15 aa, Fagopyrum tataricum
NGRQEVEVFLPFQSR

SEQ ID NO: 4539 - protein, 15 aa, Fagopyrum tataricum
HSALYVTRGEGRVQV

SEQ ID NO: 4540 - protein, 15 aa, Fagopyrum tataricum
FLPFQSRDEKERERF

SEQ ID NO: 4541 - protein, 15 aa, Fagopyrum tataricum
NRPSRADVFNPRAGR

SEQ ID NO: 4542 - protein, 15 aa, Fagopyrum tataricum
LPILEFIQLSAQHVV

SEQ ID NO: 4543 - protein, 15 aa, Fagopyrum tataricum
FRLKNGRQEVEVFLP

SEQ ID NO: 4544 - protein, 15 aa, Fagopyrum tataricum
NAILGPRWNLNAHSA

SEQ ID NO: 4545 - protein, 15 aa, Fagopyrum tataricum
DEGRSVFDDNVQRGQ

SEQ ID NO: 4546 - protein, 15 aa, Fagopyrum tataricum
DVFNPRAGRINTVNS

SEQ ID NO: 4547 - protein, 15 aa, Fagopyrum tataricum
NNLPILEFIQLSAQH

SEQ ID NO: 4548 - protein, 15 aa, Fagopyrum tataricum
VFNPRAGRINTVNSN

SEQ ID NO: 4549 - protein, 15 aa, Fagopyrum tataricum
VFLPFQSRDEKERER

SEQ ID NO: 4550 - protein, 15 aa, Fagopyrum tataricum
EGLEWVELKNDDNAI

SEQ ID NO: 4551 - protein, 15 aa, Fagopyrum tataricum
ILGPRWNLNAHSALY

SEQ ID NO: 4552 - protein, 15 aa, Fagopyrum tataricum
AITSPIAGKTSVLRA

SEQ ID NO: 4553 - protein, 15 aa, Fagopyrum tataricum
LGPRWNLNAHSALYV

SEQ ID NO: 4554 - protein, 15 aa, Fagopyrum tataricum
GRVQVVGDEGRSVFD

SEQ ID NO: 4555 - protein, 15 aa, Fagopyrum tataricum
HVVLYKNAILGPRWN

SEQ ID NO: 4556 - protein, 15 aa, Fagopyrum tataricum
KEAFRLKNGRQEVEV

SEQ ID NO: 4557 - protein, 15 aa, Fagopyrum tataricum
LYKNAILGPRWNLNA

SEQ ID NO: 4558 - protein, 15 aa, Fagopyrum tataricum
WNLNAHSALYVTRGE

SEQ ID NO: 4559 - protein, 15 aa, Fagopyrum tataricum
NLNAHSALYVTRGEG

SEQ ID NO: 4560 - protein, 15 aa, Fagopyrum tataricum
PILEFIQLSAQHVVL

SEQ ID NO: 4561 - protein, 15 aa, Fagopyrum tataricum
NVQRGQILVVPQGFA

SEQ ID NO: 4562 - protein, 15 aa, Fagopyrum tataricum
FAVVLKAGREGLEWV

SEQ ID NO: 4563 - protein, 15 aa, Fagopyrum tataricum
AIPVEVLANSYDIST

SEQ ID NO: 4564 - protein, 15 aa, Fagopyrum tataricum
VPQGFAVVLKAGREG

SEQ ID NO: 4565 - protein, 15 aa, Fagopyrum tataricum
EFIQLSAQHVVLYKN

SEQ ID NO: 4566 - protein, 15 aa, Fagopyrum tataricum
RPSRADVFNPRAGRI

SEQ ID NO: 4567 - protein, 15 aa, Fagopyrum tataricum
DNAITSPIAGKTSVL

SEQ ID NO: 4568 - protein, 15 aa, Fagopyrum tataricum
AQHVVLYKNAILGPR

SEQ ID NO: 4569 - protein, 15 aa, Fagopyrum tataricum
PQGFAVVLKAGREGL

SEQ ID NO: 4570 - protein, 15 aa, Fagopyrum tataricum
EVLANSYDISTKEAF

SEQ ID NO: 4571 - protein, 15 aa, Fagopyrum tataricum
GRQEVEVFLPFQSRD

SEQ ID NO: 4572 - protein, 15 aa, Fagopyrum tataricum
KQNVNRPSRADVFNP

SEQ ID NO: 4573 - protein, 15 aa, Fagopyrum tataricum
LEWVELKNDDNAITS

SEQ ID NO: 4574 - protein, 15 aa, Fagopyrum tataricum
KAGREGLEWVELKND

SEQ ID NO: 4575 - protein, 15 aa, Fagopyrum tataricum
QNVNRPSRADVFNPR

SEQ ID NO: 4576 - protein, 15 aa, Fagopyrum tataricum
AVVLKAGREGLEWVE

SEQ ID NO: 4577 - protein, 15 aa, Fagopyrum tataricum
VEVLANSYDISTKEA

SEQ ID NO: 4578 - protein, 15 aa, Fagopyrum tataricum
IPVEVLANSYDISTK

SEQ ID NO: 4579 - protein, 15 aa, Fagopyrum tataricum
GGSGRSNGLEQAFCN

SEQ ID NO: 4580 - protein, 15 aa, Fagopyrum tataricum
ELKNDDNAITSPIAG

SEQ ID NO: 4581 - protein, 15 aa, Fagopyrum tataricum
RGEGRVQVVGDEGRS

SEQ ID NO: 4582 - protein, 15 aa, Fagopyrum tataricum
YDISTKEAFRLKNGR

SEQ ID NO: 4583 - protein, 15 aa, Glycine max
PVVVNATSNLNFFAI

SEQ ID NO: 4584 - protein, 15 aa, Glycine max
KNPQLRDLDIFLSIV

SEQ ID NO: 4585 - protein, 15 aa, Glycine max
SKPNTLLLPNHADAD

SEQ ID NO: 4586 - protein, 15 aa, Glycine max
TLAIPVNKPGRFESF

SEQ ID NO: 4587 - protein, 15 aa, Glycine max
NSKPNTLLLPNHADA

SEQ ID NO: 4588 - protein, 15 aa, Glycine max
NFFAIGINAENNQRN

SEQ ID NO: 4589 - protein, 15 aa, Glycine max
VEKLLKNQRESYFVD

SEQ ID NO: 4590 - protein, 15 aa, Glycine max
EKNPQLRDLDIFLSI

SEQ ID NO: 4591 - protein, 15 aa, Glycine max
EFNSKPNTLLLPNHA

SEQ ID NO: 4592 - protein, 15 aa, Glycine max
FFAIGINAENNQRNF

SEQ ID NO: 4593 - protein, 15 aa, Glycine max
VVVNATSNLNFFAIG

SEQ ID NO: 4594 - protein, 15 aa, Glycine max
IARPSRADFYNPKAG

SEQ ID NO: 4595 - protein, 15 aa, Glycine max
LNANSVIYVTRGQGK

SEQ ID NO: 4596 - protein, 15 aa, Glycine max
NLNALEPDHRVESEG

SEQ ID NO: 4597 - protein, 15 aa, Glycine max
RAIPSEVLAHSYNLR

SEQ ID NO: 4598 - protein, 15 aa, Glycine max
KNGIYSPHWNLNANS

SEQ ID NO: 4599 - protein, 15 aa, Glycine max
ENIARPSRADFYNPK

SEQ ID NO: 4600 - protein, 15 aa, Glycine max
PSRADFYNPKAGRIS

SEQ ID NO: 4601 - protein, 15 aa, Glycine max
VFRAIPSEVLAHSYN

SEQ ID NO: 4602 - protein, 15 aa, Glycine max
KDVFRAIPSEVLAHS

SEQ ID NO: 4603 - protein, 15 aa, Glycine max
GCETRNGVEENICTL

SEQ ID NO: 4604 - protein, 15 aa, Glycine max
CETRNGVEENICTLK

SEQ ID NO: 4605 - protein, 15 aa, Glycine max
NIARPSRADFYNPKA

SEQ ID NO: 4606 - protein, 15 aa, Glycine max
RADFYNPKAGRISTL

SEQ ID NO: 4607 - protein, 15 aa, Juglans nigra
LMDTTNNANQLDQNP

SEQ ID NO: 4608 - protein, 15 aa, Juglans nigra
HWCYNDGDTPVVAVA

SEQ ID NO: 4609 - protein, 15 aa, Juglans nigra
VAVALMDTTNNANQL

SEQ ID NO: 4610 - protein, 15 aa, Juglans regia
EMACPHVSSQSYEGQ

SEQ ID NO: 4611 - protein, 15 aa, Juglans regia
AMMVPHYNSKATVVV

SEQ ID NO: 4612 - protein, 15 aa, Juglans regia
MMVPHYNSKATVVVY

SEQ ID NO: 4613 - protein, 15 aa, Juglans regia
LQPVNNPGQFREYYA

SEQ ID NO: 4614 - protein, 15 aa, Juglans regia
ACPHVSSQSYEGQGR

SEQ ID NO: 4615 - protein, 15 aa, Juglans regia
DINGENNQRDFLAGQ

SEQ ID NO: 4616 - protein, 15 aa, Juglans regia
GAMMVPHYNSKATVV

SEQ ID NO: 4617 - protein, 15 aa, Juglans regia
QPVNNPGQFREYYAA

SEQ ID NO: 4618 - protein, 15 aa, Juglans regia
YEMACPHVSSQSYEG

SEQ ID NO: 4619 - protein, 15 aa, Juglans regia
FDINGENNQRDFLAG

SEQ ID NO: 4620 - protein, 15 aa, Juglans regia
RGAMMVPHYNSKATV

SEQ ID NO: 4621 - protein, 15 aa, Juglans regia
PVNNPGQFREYYAAG

SEQ ID NO: 4622 - protein, 15 aa, Juglans regia
SQNENLRLLGFDING

SEQ ID NO: 4623 - protein, 15 aa, Juglans regia
NQLEREAKELSFNMP

SEQ ID NO: 4624 - protein, 15 aa, Juglans regia
MACPHVSSQSYEGQG

SEQ ID NO: 4625 - protein, 15 aa, Juglans regia
NYAEIKRGAMMVPHY

SEQ ID NO: 4626 - protein, 15 aa, Juglans regia
SLLDTNNNANQLDQN

SEQ ID NO: 4627 - protein, 15 aa, Juglans regia
ISLLDTNNNANQLDQ

SEQ ID NO: 4628 - protein, 15 aa, Juglans regia
AISLLDTNNNANQLD

SEQ ID NO: 4629 - protein, 15 aa, Juglans regia
VNSHTLPVLRWLQLS

SEQ ID NO: 4630 - protein, 15 aa, Juglans regia
QYSNAPQLVYIARGR

SEQ ID NO: 4631 - protein, 15 aa, Lens culinaris
HPVAINASSDLNLIG

SEQ ID NO: 4632 - protein, 15 aa, Lens culinaris
IFVNSVEIKEGSLLL

SEQ ID NO: 4633 - protein, 15 aa, Lens culinaris
VNSVEIKEGSLLLPN

SEQ ID NO: 4634 - protein, 15 aa, Lens culinaris
QKQSHFANAQPLQIE

SEQ ID NO: 4635 - protein, 15 aa, Lens culinaris
IPAGHPVAINASSDL

SEQ ID NO: 4636 - protein, 15 aa, Lens culinaris
NILEAAFNTEYEEIE

SEQ ID NO: 4637 - protein, 15 aa, Lens culinaris
LSGFSKNILEAAFNT

SEQ ID NO: 4638 - protein, 15 aa, Lens culinaris
FVNSVEIKEGSLLLP

SEQ ID NO: 4639 - protein, 15 aa, Lens culinaris
FLSGFSKNILEAAFN

SEQ ID NO: 4640 - protein, 15 aa, Lens culinaris
KNILEAAFNTEYEEI

SEQ ID NO: 4641 - protein, 15 aa, Lens culinaris
LVIPAGHPVAINASS

SEQ ID NO: 4642 - protein, 15 aa, Lens culinaris
KNPQLQDLDIFVNSV

SEQ ID NO: 4643 - protein, 15 aa, Lens culinaris
ILEAAFNTEYEEIEK

SEQ ID NO: 4644 - protein, 15 aa, Lens culinaris
VLVIPAGHPVAINAS

SEQ ID NO: 4645 - protein, 15 aa, Lens culinaris
NASSDLNLIGFGINA

SEQ ID NO: 4646 - protein, 15 aa, Lens culinaris
NPQLQDLDIFVNSVE

SEQ ID NO: 4647 - protein, 15 aa, Lens culinaris
NSVEIKEGSLLLPNY

SEQ ID NO: 4648 - protein, 15 aa, Lupinus albus
LRLLGFGINAYENQR

SEQ ID NO: 4649 - protein, 15 aa, Lupinus albus
DRNPQVQDLDISLTF

SEQ ID NO: 4650 - protein, 15 aa, Lupinus albus
GSAEDIERLIKNQQQ

SEQ ID NO: 4651 - protein, 15 aa, Lupinus albus
PEEVRRYSARLSEGD

SEQ ID NO: 4652 - protein, 15 aa, Lupinus albus
SKPNTLILPKHSDAD

SEQ ID NO: 4653 - protein, 15 aa, Lupinus albus
GSTSYILNPDDNQKL

SEQ ID NO: 4654 - protein, 15 aa, Lupinus albus
YSARLSEGDIFVIPA

SEQ ID NO: 4655 - protein, 15 aa, Lupinus albus
QAYNLEYGDALRIPA

SEQ ID NO: 4656 - protein, 15 aa, Lupinus albus
IVEFQSKPNTLILPK

SEQ ID NO: 4657 - protein, 15 aa, Lupinus albus
YFSGFSRNTLEATFN

SEQ ID NO: 4658 - protein, 15 aa, Lupinus albus
LTFTEINEGALLLPH

SEQ ID NO: 4659 - protein, 15 aa, Lupinus albus
ILNPDDNQKLRVVKL

SEQ ID NO: 4660 - protein, 15 aa, Lupinus albus
VRRYSARLSEGDIFV

SEQ ID NO: 4661 - protein, 15 aa, Lupinus albus
AEDIERLIKNQQQSY

SEQ ID NO: 4662 - protein, 15 aa, Lupinus albus
RNTLEATFNTRYEEI

SEQ ID NO: 4663 - protein, 15 aa, Lupinus albus
ILPKHSDADYVLVVL

SEQ ID NO: 4664 - protein, 15 aa, Lupinus albus
RYSARLSEGDIFVIP

SEQ ID NO: 4665 - protein, 15 aa, Lupinus albus
YGDALRIPAGSTSYI

SEQ ID NO: 4666 - protein, 15 aa, Lupinus albus
LQNYRIVEFQSKPNT

SEQ ID NO: 4667 - protein, 15 aa, Lupinus albus
NASSNLRLLGFGINA

SEQ ID NO: 4668 - protein, 15 aa, Lupinus albus
STSYILNPDDNQKLR

SEQ ID NO: 4669 - protein, 15 aa, Lupinus albus
SRNTLEATFNTRYEE

SEQ ID NO: 4670 - protein, 15 aa, Lupinus albus
DQQSYFSGFSRNTLE

SEQ ID NO: 4671 - protein, 15 aa, Lupinus albus
TLILPKHSDADYVLV

SEQ ID NO: 4672 - protein, 15 aa, Lupinus albus
VEFQSKPNTLILPKH

SEQ ID NO: 4673 - protein, 15 aa, Lupinus albus
RRYSARLSEGDIFVI

SEQ ID NO: 4674 - protein, 15 aa, Lupinus albus
PQVQDLDISLTFTEI

SEQ ID NO: 4675 - protein, 15 aa, Lupinus albus
NTLEATFNTRYEEIQ

SEQ ID NO: 4676 - protein, 15 aa, Lupinus albus
QQSYFSGFSRNTLEA

SEQ ID NO: 4677 - protein, 15 aa, Lupinus albus
HSDADYVLVVLNGRA

SEQ ID NO: 4678 - protein, 15 aa, Lupinus albus
NLRLLGFGINAYENQ

SEQ ID NO: 4679 - protein, 15 aa, Lupinus albus
QSYFSGFSRNTLEAT

SEQ ID NO: 4680 - protein, 15 aa, Lupinus albus
DALRIPAGSTSYILN

SEQ ID NO: 4681 - protein, 15 aa, Lupinus albus
FSGFSRNTLEATFNT

SEQ ID NO: 4682 - protein, 15 aa, Lupinus albus
RNPQVQDLDISLTFT

SEQ ID NO: 4683 - protein, 15 aa, Lupinus albus
NPQVQDLDISLTFTE

SEQ ID NO: 4684 - protein, 15 aa, Lupinus albus
RLLGFGINAYENQRN

SEQ ID NO: 4685 - protein, 15 aa, Lupinus albus
PDRNPQVQDLDISLT

SEQ ID NO: 4686 - protein, 15 aa, Lupinus albus
SGFSRNTLEATFNTR

SEQ ID NO: 4687 - protein, 15 aa, Lupinus albus
FQSKPNTLILPKHSD

SEQ ID NO: 4688 - protein, 15 aa, Lupinus albus
LPKHSDADYVLVVLN

SEQ ID NO: 4689 - protein, 15 aa, Lupinus albus
TFTEINEGALLLPHY

SEQ ID NO: 4690 - protein, 15 aa, Lupinus angustifolius
QSYFSGFSKNTLEAT

SEQ ID NO: 4691 - protein, 15 aa, Lupinus angustifolius
FSKNTLEATFNTRYE

SEQ ID NO: 4692 - protein, 15 aa, Lupinus angustifolius
YSARLSEGDIFVIPA

SEQ ID NO: 4693 - protein, 15 aa, Lupinus angustifolius
SNPNTLILPKHSDAD

SEQ ID NO: 4694 - protein, 15 aa, Lupinus angustifolius
ILNPDDNQNLRVVKL

SEQ ID NO: 4695 - protein, 15 aa, Lupinus angustifolius
DALRLPAGTTSYILN

SEQ ID NO: 4696 - protein, 15 aa, Lupinus angustifolius
QAYNLEYGDALRLPA

SEQ ID NO: 4697 - protein, 15 aa, Lupinus angustifolius
IVEFQSNPNTLILPK

SEQ ID NO: 4698 - protein, 15 aa, Lupinus angustifolius
LTFTEINEGALLLPH

SEQ ID NO: 4699 - protein, 15 aa, Lupinus angustifolius
TTSYILNPDDNQNLR

SEQ ID NO: 4700 - protein, 15 aa, Lupinus angustifolius
TLILPKHSDADYILV

SEQ ID NO: 4701 - protein, 15 aa, Lupinus angustifolius
VRRYSARLSEGDIFV

SEQ ID NO: 4702 - protein, 15 aa, Lupinus angustifolius
DQQSYFSGFSKNTLE

SEQ ID NO: 4703 - protein, 15 aa, Lupinus angustifolius
AQDVERLIKNQQQSY

SEQ ID NO: 4704 - protein, 15 aa, Lupinus angustifolius
YGDALRLPAGTTSYI

SEQ ID NO: 4705 - protein, 15 aa, Lupinus angustifolius
RYSARLSEGDIFVIP

SEQ ID NO: 4706 - protein, 15 aa, Lupinus angustifolius
FQSNPNTLILPKHSD

SEQ ID NO: 4707 - protein, 15 aa, Lupinus angustifolius
GSAQDVERLIKNQQQ

SEQ ID NO: 4708 - protein, 15 aa, Lupinus angustifolius
SKNTLEATFNTRYEE

SEQ ID NO: 4709 - protein, 15 aa, Lupinus angustifolius
NASSNLRLLGFGINA

SEQ ID NO: 4710 - protein, 15 aa, Lupinus angustifolius
LQNYRIVEFQSNPNT

SEQ ID NO: 4711 - protein, 15 aa, Lupinus angustifolius
EEEVRRYSARLSEGD

SEQ ID NO: 4712 - protein, 15 aa, Lupinus angustifolius
ILPKHSDADYILVVL

SEQ ID NO: 4713 - protein, 15 aa, Lupinus angustifolius
NLRLLGFGINANENQ

SEQ ID NO: 4714 - protein, 15 aa, Lupinus angustifolius
SGFSKNTLEATFNTR

SEQ ID NO: 4715 - protein, 15 aa, Lupinus angustifolius
YFSGFSKNTLEATFN

SEQ ID NO: 4716 - protein, 15 aa, Lupinus angustifolius
VEFQSNPNTLILPKH

SEQ ID NO: 4717 - protein, 15 aa, Lupinus angustifolius
FSGFSKNTLEATFNT

SEQ ID NO: 4718 - protein, 15 aa, Lupinus angustifolius
PQVQDLDISLTFTEI

SEQ ID NO: 4719 - protein, 15 aa, Lupinus angustifolius
HSDADYILVVLNGRA

SEQ ID NO: 4720 - protein, 15 aa, Lupinus angustifolius
NTLEATFNTRYEEIQ

SEQ ID NO: 4721 - protein, 15 aa, Lupinus angustifolius
QQSYFSGFSKNTLEA

SEQ ID NO: 4722 - protein, 15 aa, Lupinus angustifolius
KNTLEATFNTRYEEI

SEQ ID NO: 4723 - protein, 15 aa, Lupinus angustifolius
RNPQVQDLDISLTFT

SEQ ID NO: 4724 - protein, 15 aa, Lupinus angustifolius
NPQVQDLDISLTFTE

SEQ ID NO: 4725 - protein, 15 aa, Lupinus angustifolius
LRLLGFGINANENQR

SEQ ID NO: 4726 - protein, 15 aa, Lupinus angustifolius
GTTSYILNPDDNQNL

SEQ ID NO: 4727 - protein, 15 aa, Lupinus angustifolius
RLLGFGINANENQRN

SEQ ID NO: 4728 - protein, 15 aa, Lupinus angustifolius
TFTEINEGALLLPHY

SEQ ID NO: 4729 - protein, 15 aa, Lupinus angustifolius
LPKHSDADYILVVLN

SEQ ID NO: 4730 - protein, 15 aa, Pinus koraiensis
EQIREMMRRGGFSAE

SEQ ID NO: 4731 - protein, 15 aa, Pinus koraiensis
YANEEQIREMMRRGG

SEQ ID NO: 4732 - protein, 15 aa, Pisum sativum
NILEAAFNTNYEEIE

SEQ ID NO: 4733 - protein, 15 aa, Pisum sativum
NSVDIKEGSLLLPNY

SEQ ID NO: 4734 - protein, 15 aa, Pisum sativum
LLSGFSKNILEAAFN

SEQ ID NO: 4735 - protein, 15 aa, Pisum sativum
HPVAINASSDLNLIG

SEQ ID NO: 4736 - protein, 15 aa, Pisum sativum
VFVIPAGHPVAINAS

SEQ ID NO: 4737 - protein, 15 aa, Pisum sativum
EENVIVKVSREQIEE

SEQ ID NO: 4738 - protein, 15 aa, Pisum sativum
KNILEAAFNTNYEEI

SEQ ID NO: 4739 - protein, 15 aa, Pisum sativum
LSGFSKNILEAAFNT

SEQ ID NO: 4740 - protein, 15 aa, Pisum sativum
ILEAAFNTNYEEIEK

SEQ ID NO: 4741 - protein, 15 aa, Pisum sativum
FVNSVDIKEGSLLLP

SEQ ID NO: 4742 - protein, 15 aa, Pisum sativum
VNSVDIKEGSLLLPN

SEQ ID NO: 4743 - protein, 15 aa, Pisum sativum
IFVNSVDIKEGSLLL

SEQ ID NO: 4744 - protein, 15 aa, Pisum sativum
NQQLQDLDIFVNSVD

SEQ ID NO: 4745 - protein, 15 aa, Pisum sativum
KNQQLQDLDIFVNSV

SEQ ID NO: 4746 - protein, 15 aa, Pisum sativum
NASSDLNLIGFGINA

SEQ ID NO: 4747 - protein, 15 aa, Pisum sativum
ENVIVKVSREQIEEL

SEQ ID NO: 4748 - protein, 15 aa, Pisum sativum
FVIPAGHPVAINASS

SEQ ID NO: 4749 - protein, 15 aa, Pisum sativum
IPVNGPGKFEAFDLA

SEQ ID NO: 4750 - protein, 15 aa, Pisum sativum
NQKQSHFANAEPEQK

SEQ ID NO: 4751 - protein, 15 aa, Pisum sativum
LIKNQKQSHFANAEP

SEQ ID NO: 4752 - protein, 15 aa, Pisum sativum
VVIIPAGHPVAITAS

SEQ ID NO: 4753 - protein, 15 aa, Pistacia vera
IHGAVFPGCPETFQE

SEQ ID NO: 4754 - protein, 15 aa, Pistacia vera
DAILAPHWNVNAHSI

SEQ ID NO: 4755 - protein, 15 aa, Pistacia vera
LNALEPKRRIESEAG

SEQ ID NO: 4756 - protein, 15 aa, Pistacia vera
NDPSRADVYNPRGGR

SEQ ID NO: 4757 - protein, 15 aa, Pistacia vera
YNPRGGRVSSVNALN

SEQ ID NO: 4758 - protein, 15 aa, Pistacia vera
ALPAGVAHWIYNNGQ

SEQ ID NO: 4759 - protein, 15 aa, Pistacia vera
KYNINDPSRADVYNP

SEQ ID NO: 4760 - protein, 15 aa, Pistacia vera
NINDPSRADVYNPRG

SEQ ID NO: 4761 - protein, 15 aa, Pistacia vera
AHSIVYITRGNGRIQ

SEQ ID NO: 4762 - protein, 15 aa, Pistacia vera
LPAGVAHWIYNNGQS

SEQ ID NO: 4763 - protein, 15 aa, Pistacia vera
WVSFKTNGLSQTSQL

SEQ ID NO: 4764 - protein, 15 aa, Pistacia vera
IVVSGEGRLEIACPH

SEQ ID NO: 4765 - protein, 15 aa, Pistacia vera
GKKNIIEVMEKEAKE

SEQ ID NO: 4766 - protein, 15 aa, Pistacia vera
KTKGEEVDKVFGKQD

SEQ ID NO: 4767 - protein, 15 aa, Pistacia vera
KQDEGAIVKASKEQI

SEQ ID NO: 4768 - protein, 15 aa, Pistacia vera
KQDEEFFFQGPKWRQ

SEQ ID NO: 4769 - protein, 15 aa, Pistacia vera
RRGEGPSIWPFTGKS

SEQ ID NO: 4770 - protein, 15 aa, Pistacia vera
EGPSIWPFTGKSTGT

SEQ ID NO: 4771 - protein, 15 aa, Pistacia vera
AKGCEKYYKEKKGRE

SEQ ID NO: 4772 - protein, 15 aa, Pistacia vera
TKIAIVVSGEGRLEI

SEQ ID NO: 4773 - protein, 15 aa, Pistacia vera
TGTFNLFKKDPSQSN

SEQ ID NO: 4774 - protein, 15 aa, Pistacia vera
QDEEFFFQGPKWRQH

SEQ ID NO: 4775 - protein, 15 aa, Pistacia vera
FLVANPQAFVVPNHM

SEQ ID NO: 4776 - protein, 15 aa, Pistacia vera
QKQLCRFRCQEKYKK

SEQ ID NO: 4777 - protein, 15 aa, Pistacia vera
NITKGGMSGPFYNSR

SEQ ID NO: 4778 - protein, 15 aa, Pistacia vera
GTITKIRENKRESMN

SEQ ID NO: 4779 - protein, 15 aa, Pistacia vera
QIRAMSRRGEGPSIW

SEQ ID NO: 4780 - protein, 15 aa, Pistacia vera
KQLCRFRCQEKYKKE

SEQ ID NO: 4781 - protein, 15 aa, Pistacia vera
NTDENEKLYIVKLLQ

SEQ ID NO: 4782 - protein, 15 aa, Pistacia vera
FVVPNHMDADSIFFV

SEQ ID NO: 4783 - protein, 15 aa, Pistacia vera
TKGEEVDKVFGKQDE

SEQ ID NO: 4784 - protein, 15 aa, Pistacia vera
SGPFYNSRATKIAIV

SEQ ID NO: 4785 - protein, 15 aa, Pistacia vera
GDEFSTHEPGEKRLS

SEQ ID NO: 4786 - protein, 15 aa, Pistacia vera
SQCMKQCERQDGGQQ

SEQ ID NO: 4787 - protein, 15 aa, Pistacia vera
RYTLAGKKNIIEVME

SEQ ID NO: 4788 - protein, 15 aa, Pistacia vera
GRGTITKIRENKRES

SEQ ID NO: 4789 - protein, 15 aa, Pistacia vera
NHMDADSIFFVSWGR

SEQ ID NO: 4790 - protein, 15 aa, Pistacia vera
SWGRGTITKIRENKR

SEQ ID NO: 4791 - protein, 15 aa, Pistacia vera
SQSNNYGQLFESEFK

SEQ ID NO: 4792 - protein, 15 aa, Pistacia vera
NLEILCFEVNAEGNI

SEQ ID NO: 4793 - protein, 15 aa, Pistacia vera
GGMSGPFYNSRATKI

SEQ ID NO: 4794 - protein, 15 aa, Pistacia vera
PFYNSRATKIAIVVS

SEQ ID NO: 4795 - protein, 15 aa, Pistacia vera
IRYTLAGKKNIIEVM

SEQ ID NO: 4796 - protein, 15 aa, Pistacia vera
NLFKKDPSQSNNYGQ

SEQ ID NO: 4797 - protein, 15 aa, Pistacia vera
VFEDEHFTTRVKTEQ

SEQ ID NO: 4798 - protein, 15 aa, Pistacia vera
QPVNLPGHYEVFHGP

SEQ ID NO: 4799 - protein, 15 aa, Pistacia vera
MKQCERQDGGQQKQL

SEQ ID NO: 4800 - protein, 15 aa, Pistacia vera
STHEPGEKRLSQCMK

SEQ ID NO: 4801 - protein, 15 aa, Pistacia vera
VVSGEGRLEIACPHL

SEQ ID NO: 4802 - protein, 15 aa, Pistacia vera
KDPSQSNNYGQLFES

SEQ ID NO: 4803 - protein, 15 aa, Pistacia vera
DADSIFFVSWGRGTI

SEQ ID NO: 4804 - protein, 15 aa, Pistacia vera
KTEQGKVVVLPKFTK

SEQ ID NO: 4805 - protein, 15 aa, Pistacia vera
SNNYGQLFESEFKDY

SEQ ID NO: 4806 - protein, 15 aa, Pistacia vera
KVQRQYDEEQKEQCA

SEQ ID NO: 4807 - protein, 15 aa, Pistacia vera
RQYDEEQKEQCAKGC

SEQ ID NO: 4808 - protein, 15 aa, Pistacia vera
KKDPSQSNNYGQLFE

SEQ ID NO: 4809 - protein, 15 aa, Pistacia vera
DKVFGKQDEEFFFQG

SEQ ID NO: 4810 - protein, 15 aa, Pistacia vera
FSTHEPGEKRLSQCM

SEQ ID NO: 4811 - protein, 15 aa, Pistacia vera
ELAFKTKGEEVDKVF

SEQ ID NO: 4812 - protein, 15 aa, Pistacia vera
SKLLRGLEKYRLAFL

SEQ ID NO: 4813 - protein, 15 aa, Pistacia vera
YVFEDEHFTTRVKTE

SEQ ID NO: 4814 - protein, 15 aa, Pistacia vera
FVVPAGHPFVTVASG

SEQ ID NO: 4815 - protein, 15 aa, Pistacia vera
GMSGPFYNSRATKIA

SEQ ID NO: 4816 - protein, 15 aa, Pistacia vera
EIACPHLSSSKNSGQ

SEQ ID NO: 4817 - protein, 15 aa, Pistacia vera
FHGPGGENPESFYRA

SEQ ID NO: 4818 - protein, 15 aa, Pistacia vera
LCFEVNAEGNIRYTL

SEQ ID NO: 4819 - protein, 15 aa, Pistacia vera
VFHGPGGENPESFYR

SEQ ID NO: 4820 - protein, 15 aa, Pistacia vera
RLAFLVANPQAFVVP

SEQ ID NO: 4821 - protein, 15 aa, Pistacia vera
EQCAKGCEKYYKEKK

SEQ ID NO: 4822 - protein, 15 aa, Pistacia vera
QEEEDENPYVFEDEH

SEQ ID NO: 4823 - protein, 15 aa, Pistacia vera
LEKYRLAFLVANPQA

SEQ ID NO: 4824 - protein, 15 aa, Pistacia vera
QSNNYGQLFESEFKD

SEQ ID NO: 4825 - protein, 15 aa, Pistacia vera
PVNLPGHYEVFHGPG

SEQ ID NO: 4826 - protein, 15 aa, Pistacia vera
NIIEVMEKEAKELAF

SEQ ID NO: 4827 - protein, 15 aa, Pistacia vera
ENEKLYIVKLLQPVN

SEQ ID NO: 4828 - protein, 15 aa, Pistacia vera
IRAMSRRGEGPSIWP

SEQ ID NO: 4829 - protein, 15 aa, Pistacia vera
EVFHGPGGENPESFY

SEQ ID NO: 4830 - protein, 15 aa, Pistacia vera
HGPGGENPESFYRAF

SEQ ID NO: 4831 - protein, 15 aa, Pistacia vera
EVMEKEAKELAFKTK

SEQ ID NO: 4832 - protein, 15 aa, Pistacia vera
TKGGMSGPFYNSRAT

SEQ ID NO: 4833 - protein, 15 aa, Pistacia vera
HPFVTVASGNQNLEI

SEQ ID NO: 4834 - protein, 15 aa, Pistacia vera
CQEKYKKERREHSYS

SEQ ID NO: 4835 - protein, 15 aa, Pistacia vera
AEGNIRYTLAGKKNI

SEQ ID NO: 4836 - protein, 15 aa, Pistacia vera
VVPNHMDADSIFFVS

SEQ ID NO: 4837 - protein, 15 aa, Pistacia vera
EKEAKELAFKTKGEE

SEQ ID NO: 4838 - protein, 15 aa, Pistacia vera
VANPQAFVVPNHMDA

SEQ ID NO: 4839 - protein, 15 aa, Pistacia vera
MEKEAKELAFKTKGE

SEQ ID NO: 4840 - protein, 15 aa, Pistacia vera
DGGQQKQLCRFRCQE

SEQ ID NO: 4841 - protein, 15 aa, Pistacia vera
TITKIRENKRESMNV

SEQ ID NO: 4842 - protein, 15 aa, Pistacia vera
EQIRAMSRRGEGPSI

SEQ ID NO: 4843 - protein, 15 aa, Pistacia vera
FTGKSTGTFNLFKKD

SEQ ID NO: 4844 - protein, 15 aa, Pistacia vera
QLCRFRCQEKYKKER

SEQ ID NO: 4845 - protein, 15 aa, Pistacia vera
NKRESMNVKQGDIIR

SEQ ID NO: 4846 - protein, 15 aa, Pistacia vera
VMEKEAKELAFKTKG

SEQ ID NO: 4847 - protein, 15 aa, Pistacia vera
VFVVPAGHPFVTVAS

SEQ ID NO: 4848 - protein, 15 aa, Pistacia vera
SRRGEGPSIWPFTGK

SEQ ID NO: 4849 - protein, 15 aa, Pistacia vera
GTFNLFKKDPSQSNN

SEQ ID NO: 4850 - protein, 15 aa, Pistacia vera
LAFLVANPQAFVVPN

SEQ ID NO: 4851 - protein, 15 aa, Pistacia vera
MDADSIFFVSWGRGT

SEQ ID NO: 4852 - protein, 15 aa, Pistacia vera
EEVDKVFGKQDEEFF

SEQ ID NO: 4853 - protein, 15 aa, Pistacia vera
GPGGENPESFYRAFS

SEQ ID NO: 4854 - protein, 15 aa, Pistacia vera
GKQDEEFFFQGPKWR

SEQ ID NO: 4855 - protein, 15 aa, Pistacia vera
KLLRGLEKYRLAFLV

SEQ ID NO: 4856 - protein, 15 aa, Pistacia vera
PFYIVNTDENEKLYI

SEQ ID NO: 4857 - protein, 15 aa, Pistacia vera
VSGEGRLEIACPHLS

SEQ ID NO: 4858 - protein, 15 aa, Pistacia vera
YRLAFLVANPQAFVV

SEQ ID NO: 4859 - protein, 15 aa, Pistacia vera
VASGNQNLEILCFEV

SEQ ID NO: 4860 - protein, 15 aa, Pistacia vera
GCEKYYKEKKGREQE

SEQ ID NO: 4861 - protein, 15 aa, Pistacia vera
QEKYKKERREHSYSR

SEQ ID NO: 4862 - protein, 15 aa, Pistacia vera
KGCEKYYKEKKGREQ

SEQ ID NO: 4863 - protein, 15 aa, Pistacia vera
HFTTRVKTEQGKVVV

SEQ ID NO: 4864 - protein, 15 aa, Pistacia vera
DEEFFFQGPKWRQHQ

SEQ ID NO: 4865 - protein, 15 aa, Pistacia vera
KKNIIEVMEKEAKEL

SEQ ID NO: 4866 - protein, 15 aa, Pistacia vera
VFGKQDEEFFFQGPK

SEQ ID NO: 4867 - protein, 15 aa, Pistacia vera
FKTKGEEVDKVFGKQ

SEQ ID NO: 4868 - protein, 15 aa, Pistacia vera
WPFTGKSTGTFNLFK

SEQ ID NO: 4869 - protein, 15 aa, Pistacia vera
EAKELAFKTKGEEVD

SEQ ID NO: 4870 - protein, 15 aa, Pistacia vera
DEEQKEQCAKGCEKY

SEQ ID NO: 4871 - protein, 15 aa, Pistacia vera
GGQQKQLCRFRCQEK

SEQ ID NO: 4872 - protein, 15 aa, Pistacia vera
ATKIAIVVSGEGRLE

SEQ ID NO: 4873 - protein, 15 aa, Pistacia vera
RFRCQEKYKKERREH

SEQ ID NO: 4874 - protein, 15 aa, Pistacia vera
QCERQDGGQQKQLCR

SEQ ID NO: 4875 - protein, 15 aa, Pistacia vera
RVKTEQGKVVVLPKF

SEQ ID NO: 4876 - protein, 15 aa, Pistacia vera
RAMSRRGEGPSIWPF

SEQ ID NO: 4877 - protein, 15 aa, Pistacia vera
CRFRCQEKYKKERRE

SEQ ID NO: 4878 - protein, 15 aa, Pistacia vera
IIEVMEKEAKELAFK

SEQ ID NO: 4879 - protein, 15 aa, Pistacia vera
LSQCMKQCERQDGGQ

SEQ ID NO: 4880 - protein, 15 aa, Pistacia vera
VNAEGNIRYTLAGKK

SEQ ID NO: 4881 - protein, 15 aa, Pistacia vera
VPAGHPFVTVASGNQ

SEQ ID NO: 4882 - protein, 15 aa, Pistacia vera
GEEVDKVFGKQDEEF

SEQ ID NO: 4883 - protein, 15 aa, Pistacia vera
CMKQCERQDGGQQKQ

SEQ ID NO: 4884 - protein, 15 aa, Pistacia vera
CFEVNAEGNIRYTLA

SEQ ID NO: 4885 - protein, 15 aa, Pistacia vera
NIRYTLAGKKNIIEV

SEQ ID NO: 4886 - protein, 15 aa, Pistacia vera
SRATKIAIVVSGEGR

SEQ ID NO: 4887 - protein, 15 aa, Pistacia vera
EHFTTRVKTEQGKVV

SEQ ID NO: 4888 - protein, 15 aa, Pistacia vera
KHQCKVQRQYDEEQK

SEQ ID NO: 4889 - protein, 15 aa, Pistacia vera
PSQSNNYGQLFESEF

SEQ ID NO: 4890 - protein, 15 aa, Pistacia vera
EILCFEVNAEGNIRY

SEQ ID NO: 4891 - protein, 15 aa, Pistacia vera
NPQAFVVPNHMDADS

SEQ ID NO: 4892 - protein, 15 aa, Pistacia vera
RGTITKIRENKRESM

SEQ ID NO: 4893 - protein, 15 aa, Pistacia vera
YEVFHGPGGENPESF

SEQ ID NO: 4894 - protein, 15 aa, Pistacia vera
NSRATKIAIVVSGEG

SEQ ID NO: 4895 - protein, 15 aa, Pistacia vera
EKYRLAFLVANPQAF

SEQ ID NO: 4896 - protein, 15 aa, Pistacia vera
YTLAGKKNIIEVMEK

SEQ ID NO: 4897 - protein, 15 aa, Pistacia vera
CERQDGGQQKQLCRF

SEQ ID NO: 4898 - protein, 15 aa, Pistacia vera
AFLVANPQAFVVPNH

SEQ ID NO: 4899 - protein, 15 aa, Pistacia vera
KEAKELAFKTKGEEV

SEQ ID NO: 4900 - protein, 15 aa, Pistacia vera
NNYGQLFESEFKDYP

SEQ ID NO: 4901 - protein, 15 aa, Pistacia vera
WGRGTITKIRENKRE

SEQ ID NO: 4902 - protein, 15 aa, Pistacia vera
PFTGKSTGTFNLFKK

SEQ ID NO: 4903 - protein, 15 aa, Pistacia vera
DENPYVFEDEHFTTR

SEQ ID NO: 4904 - protein, 15 aa, Pistacia vera
ITKIRENKRESMNVK

SEQ ID NO: 4905 - protein, 15 aa, Pistacia vera
AMSRRGEGPSIWPFT

SEQ ID NO: 4906 - protein, 15 aa, Pistacia vera
AFKTKGEEVDKVFGK

SEQ ID NO: 4907 - protein, 15 aa, Pistacia vera
FVSWGRGTITKIREN

SEQ ID NO: 4908 - protein, 15 aa, Pistacia vera
QYDEEQKEQCAKGCE

SEQ ID NO: 4909 - protein, 15 aa, Pistacia vera
ILCFEVNAEGNIRYT

SEQ ID NO: 4910 - protein, 15 aa, Pistacia vera
PQAFVVPNHMDADSI

SEQ ID NO: 4911 - protein, 15 aa, Pistacia vera
RQDGGQQKQLCRFRC

SEQ ID NO: 4912 - protein, 15 aa, Pistacia vera
KGGMSGPFYNSRATK

SEQ ID NO: 4913 - protein, 15 aa, Pistacia vera
GPFYNSRATKIAIVV

SEQ ID NO: 4914 - protein, 15 aa, Pistacia vera
VNLPGHYEVFHGPGG

SEQ ID NO: 4915 - protein, 15 aa, Pistacia vera
VSWGRGTITKIRENK

SEQ ID NO: 4916 - protein, 15 aa, Pistacia vera
VKTEQGKVVVLPKFT

SEQ ID NO: 4917 - protein, 15 aa, Pistacia vera
FGKQDEEFFFQGPKW

SEQ ID NO: 4918 - protein, 15 aa, Pistacia vera
PAGHPFVTVASGNQN

SEQ ID NO: 4919 - protein, 15 aa, Pistacia vera
KEQCAKGCEKYYKEK

SEQ ID NO: 4920 - protein, 15 aa, Pistacia vera
QCAKGCEKYYKEKKG

SEQ ID NO: 4921 - protein, 15 aa, Pistacia vera
GHYEVFHGPGGENPE

SEQ ID NO: 4922 - protein, 15 aa, Pistacia vera
GQQKQLCRFRCQEKY

SEQ ID NO: 4923 - protein, 15 aa, Pistacia vera
ADSIFFVSWGRGTIT

SEQ ID NO: 4924 - protein, 15 aa, Pistacia vera
FKKDPSQSNNYGQLF

SEQ ID NO: 4925 - protein, 15 aa, Pistacia vera
SYVNITKGGMSGPFY

SEQ ID NO: 4926 - protein, 15 aa, Pistacia vera
EDEHFTTRVKTEQGK

SEQ ID NO: 4927 - protein, 15 aa, Pistacia vera
SIFFVSWGRGTITKI

SEQ ID NO: 4928 - protein, 15 aa, Pistacia vera
NPYVFEDEHFTTRVK

SEQ ID NO: 4929 - protein, 15 aa, Pistacia vera
VPNHMDADSIFFVSW

SEQ ID NO: 4930 - protein, 15 aa, Pistacia vera
CAKGCEKYYKEKKGR

SEQ ID NO: 4931 - protein, 15 aa, Pistacia vera
LEILCFEVNAEGNIR

SEQ ID NO: 4932 - protein, 15 aa, Pistacia vera
CKVQRQYDEEQKEQC

SEQ ID NO: 4933 - protein, 15 aa, Pistacia vera
KEQIRAMSRRGEGPS

SEQ ID NO: 4934 - protein, 15 aa, Pistacia vera
SGNQNLEILCFEVNA

SEQ ID NO: 4935 - protein, 15 aa, Pistacia vera
ENKRESMNVKQGDII

SEQ ID NO: 4936 - protein, 15 aa, Pistacia vera
RESMNVKQGDIIRIR

SEQ ID NO: 4937 - protein, 15 aa, Pistacia vera
MSGPFYNSRATKIAI

SEQ ID NO: 4938 - protein, 15 aa, Pistacia vera
TEQGKVVVLPKFTKR

SEQ ID NO: 4939 - protein, 15 aa, Pistacia vera
ASGNQNLEILCFEVN

SEQ ID NO: 4940 - protein, 15 aa, Pistacia vera
FYNSRATKIAIVVSG

SEQ ID NO: 4941 - protein, 15 aa, Pistacia vera
IMVSYVNITKGGMSG

SEQ ID NO: 4942 - protein, 15 aa, Pistacia vera
GNQNLEILCFEVNAE

SEQ ID NO: 4943 - protein, 15 aa, Pistacia vera
IEVMEKEAKELAFKT

SEQ ID NO: 4944 - protein, 15 aa, Pistacia vera
EVNAEGNIRYTLAGK

SEQ ID NO: 4945 - protein, 15 aa, Pistacia vera
TFNLFKKDPSQSNNY

SEQ ID NO: 4946 - protein, 15 aa, Pistacia vera
SGEGRLEIACPHLSS

SEQ ID NO: 4947 - protein, 15 aa, Pistacia vera
IAIVVSGEGRLEIAC

SEQ ID NO: 4948 - protein, 15 aa, Pistacia vera
FTTRVKTEQGKVVVL

SEQ ID NO: 4949 - protein, 15 aa, Pistacia vera
NAEGNIRYTLAGKKN

SEQ ID NO: 4950 - protein, 15 aa, Pistacia vera
VQRQYDEEQKEQCAK

SEQ ID NO: 4951 - protein, 15 aa, Pistacia vera
ANPQAFVVPNHMDAD

SEQ ID NO: 4952 - protein, 15 aa, Pistacia vera
TTRVKTEQGKVVVLP

SEQ ID NO: 4953 - protein, 15 aa, Pistacia vera
DPSQSNNYGQLFESE

SEQ ID NO: 4954 - protein, 15 aa, Pistacia vera
KIAIVVSGEGRLEIA

SEQ ID NO: 4955 - protein, 15 aa, Pistacia vera
IACPHLSSSKNSGQE

SEQ ID NO: 4956 - protein, 15 aa, Pistacia vera
MSRRGEGPSIWPFTG

SEQ ID NO: 4957 - protein, 15 aa, Pistacia vera
AIVKASKEQIRAMSR

SEQ ID NO: 4958 - protein, 15 aa, Pistacia vera
TRVKTEQGKVVVLPK

SEQ ID NO: 4959 - protein, 15 aa, Pistacia vera
NYGQLFESEFKDYPP

SEQ ID NO: 4960 - protein, 15 aa, Pistacia vera
LCRFRCQEKYKKERR

SEQ ID NO: 4961 - protein, 15 aa, Pistacia vera
GRLEIACPHLSSSKN

SEQ ID NO: 4962 - protein, 15 aa, Pistacia vera
KNIIEVMEKEAKELA

SEQ ID NO: 4963 - protein, 15 aa, Pistacia vera
AIVVSGEGRLEIACP

SEQ ID NO: 4964 - protein, 15 aa, Pistacia vera
LVANPQAFVVPNHMD

SEQ ID NO: 4965 - protein, 15 aa, Pistacia vera
KFTKRSKLLRGLEKY

SEQ ID NO: 4966 - protein, 15 aa, Pistacia vera
DEHFTTRVKTEQGKV

SEQ ID NO: 4967 - protein, 15 aa, Pistacia vera
QDGGQQKQLCRFRCQ

SEQ ID NO: 4968 - protein, 15 aa, Pistacia vera
QRQYDEEQKEQCAKG

SEQ ID NO: 4969 - protein, 15 aa, Pistacia vera
YNSRATKIAIVVSGE

SEQ ID NO: 4970 - protein, 15 aa, Pistacia vera
EGNIRYTLAGKKNII

SEQ ID NO: 4971 - protein, 15 aa, Pistacia vera
KYRLAFLVANPQAFV

SEQ ID NO: 4972 - protein, 15 aa, Pistacia vera
VDKVFGKQDEEFFFQ

SEQ ID NO: 4973 - protein, 15 aa, Pistacia vera
QQKQLCRFRCQEKYK

SEQ ID NO: 4974 - protein, 15 aa, Pistacia vera
TPFYIVNTDENEKLY

SEQ ID NO: 4975 - protein, 15 aa, Pistacia vera
VVPAGHPFVTVASGN

SEQ ID NO: 4976 - protein, 15 aa, Pistacia vera
ENPYVFEDEHFTTRV

SEQ ID NO: 4977 - protein, 15 aa, Pistacia vera
GNIRYTLAGKKNIIE

SEQ ID NO: 4978 - protein, 15 aa, Pistacia vera
KGEEVDKVFGKQDEE

SEQ ID NO: 4979 - protein, 15 aa, Pistacia vera
SKEQIRAMSRRGEGP

SEQ ID NO: 4980 - protein, 15 aa, Pistacia vera
LAFKTKGEEVDKVFG

SEQ ID NO: 4981 - protein, 15 aa, Pistacia vera
GLEKYRLAFLVANPQ

SEQ ID NO: 4982 - protein, 15 aa, Pistacia vera
NLPGHYEVFHGPGGE

SEQ ID NO: 4983 - protein, 15 aa, Pistacia vera
RATKIAIVVSGEGRL

SEQ ID NO: 4984 - protein, 15 aa, Pistacia vera
AGKKNIIEVMEKEAK

SEQ ID NO: 4985 - protein, 15 aa, Pistacia vera
IQPNGLRLPEYSNAP

SEQ ID NO: 4986 - protein, 15 aa, Pistacia vera
DRAMISPLAGSTSVL

SEQ ID NO: 4987 - protein, 15 aa, Pistacia vera
VVDNFGNTVFDGEVS

SEQ ID NO: 4988 - protein, 15 aa, Pistacia vera
QNECQIDQLDALEPD

SEQ ID NO: 4989 - protein, 15 aa, Pistacia vera
RCAGVAVARHTIQPN

SEQ ID NO: 4990 - protein, 15 aa, Pistacia vera
PNGLRLPEYSNAPTL

SEQ ID NO: 4991 - protein, 15 aa, Pistacia vera
GQRFEWISFKTNDRA

SEQ ID NO: 4992 - protein, 15 aa, Pistacia vera
QQQNECQIDQLDALE

SEQ ID NO: 4993 - protein, 15 aa, Pistacia vera
STSVLRAMPEEVLAN

SEQ ID NO: 4994 - protein, 15 aa, Pistacia vera
LRAMPEEVLANAFQI

SEQ ID NO: 4995 - protein, 15 aa, Pistacia vera
GQQQNECQIDQLDAL

SEQ ID NO: 4996 - protein, 15 aa, Pistacia vera
GSTSVLRAMPEEVLA

SEQ ID NO: 4997 - protein, 15 aa, Pistacia vera
NSLNLPILKWLQLSA

SEQ ID NO: 4998 - protein, 15 aa, Pistacia vera
PRKFNLAGNPEDEFQ

SEQ ID NO: 4999 - protein, 15 aa, Pistacia vera
SPLAGSTSVLRAMPE

SEQ ID NO: 5000 - protein, 15 aa, Pistacia vera
IDQLDALEPDNRVEY

SEQ ID NO: 5001 - protein, 15 aa, Pistacia vera
KFNLAGNPEDEFQQQ

SEQ ID NO: 5002 - protein, 15 aa, Pistacia vera
VLRAMPEEVLANAFQ

SEQ ID NO: 5003 - protein, 15 aa, Pistacia vera
MYPRKFNLAGNPEDE

SEQ ID NO: 5004 - protein, 15 aa, Pistacia vera
PNHEQFRCAGVAVAR

SEQ ID NO: 5005 - protein, 15 aa, Pistacia vera
AGVAVARHTIQPNGL

SEQ ID NO: 5006 - protein, 15 aa, Pistacia vera
RAMPEEVLANAFQIS

SEQ ID NO: 5007 - protein, 15 aa, Pistacia vera
AMISPLAGSTSVLRA

SEQ ID NO: 5008 - protein, 15 aa, Pistacia vera
LEETICTMKLKENIH

SEQ ID NO: 5009 - protein, 15 aa, Pistacia vera
NHEQFRCAGVAVARH

SEQ ID NO: 5010 - protein, 15 aa, Pistacia vera
ETICTMKLKENIHDP

SEQ ID NO: 5011 - protein, 15 aa, Pistacia vera
DQLDALEPDNRVEYE

SEQ ID NO: 5012 - protein, 15 aa, Pistacia vera
QPNGLRLPEYSNAPT

SEQ ID NO: 5013 - protein, 15 aa, Pistacia vera
TICTMKLKENIHDPS

SEQ ID NO: 5014 - protein, 15 aa, Pistacia vera
LAGSTSVLRAMPEEV

SEQ ID NO: 5015 - protein, 15 aa, Pistacia vera
NDRAMISPLAGSTSV

SEQ ID NO: 5016 - protein, 15 aa, Pistacia vera
IVKVKGDLQVIRPPR

SEQ ID NO: 5017 - protein, 15 aa, Pistacia vera
DPNHEQFRCAGVAVA

SEQ ID NO: 5018 - protein, 15 aa, Pistacia vera
NECQIDQLDALEPDN

SEQ ID NO: 5019 - protein, 15 aa, Pistacia vera
NFGNTVFDGEVSEGQ

SEQ ID NO: 5020 - protein, 15 aa, Pistacia vera
AGSTSVLRAMPEEVL

SEQ ID NO: 5021 - protein, 15 aa, Pistacia vera
RAMISPLAGSTSVLR

SEQ ID NO: 5022 - protein, 15 aa, Pistacia vera
VPHWNFNAHSIVYGC

SEQ ID NO: 5023 - protein, 15 aa, Pistacia vera
DNFGNTVFDGEVSEG

SEQ ID NO: 5024 - protein, 15 aa, Pistacia vera
ECQIDQLDALEPDNR

SEQ ID NO: 5025 - protein, 15 aa, Pistacia vera
FNLAGNPEDEFQQQQ

SEQ ID NO: 5026 - protein, 15 aa, Pistacia vera
FGNTVFDGEVSEGQI

SEQ ID NO: 5027 - protein, 15 aa, Pistacia vera
VQVVDNFGNTVFDGE

SEQ ID NO: 5028 - protein, 15 aa, Prunus Dulcis
GRTSFLRALPDEVLA

SEQ ID NO: 5029 - protein, 15 aa, Prunus Dulcis
RNGIYSPHWNVNAHS

SEQ ID NO: 5030 - protein, 15 aa, Prunus Dulcis
SYSNAPQLIYIVQGR

SEQ ID NO: 5031 - protein, 15 aa, Prunus Dulcis
NPERADIFSPRAGRI

SEQ ID NO: 5032 - protein, 15 aa, Prunus Dulcis
LRALPDEVLANAYQI

SEQ ID NO: 5033 - protein, 15 aa, Prunus Dulcis
FYLAGNPENEFNQQG

SEQ ID NO: 5034 - protein, 15 aa, Prunus Dulcis
NAYQISREQARQLKY

SEQ ID NO: 5035 - protein, 15 aa, Prunus Dulcis
EVLANAYQISREQAR

SEQ ID NO: 5036 - protein, 15 aa, Prunus Dulcis
KFYLAGNPENEFNQQ

SEQ ID NO: 5037 - protein, 15 aa, Prunus Dulcis
QCAGVAASRITIQRN

SEQ ID NO: 5038 - protein, 15 aa, Prunus Dulcis
NPRKFYLAGNPENEF

SEQ ID NO: 5039 - protein, 15 aa, Prunus Dulcis
CAGVAASRITIQRNG

SEQ ID NO: 5040 - protein, 15 aa, Prunus Dulcis
ISREQARQLKYNRQE

SEQ ID NO: 5041 - protein, 15 aa, Prunus Dulcis
NFNQEDFQCAGVAAS

SEQ ID NO: 5042 - protein, 15 aa, Prunus Dulcis
SREQARQLKYNRQET

SEQ ID NO: 5043 - protein, 15 aa, Prunus Dulcis
SPRAGRISTLNSHNL

SEQ ID NO: 5044 - protein, 15 aa, Prunus Dulcis
PRKFYLAGNPENEFN

SEQ ID NO: 5045 - protein, 15 aa, Prunus Dulcis
EQARQLKYNRQETIA

SEQ ID NO: 5046 - protein, 15 aa, Prunus Dulcis
VAYWSYNDGDQELVA

SEQ ID NO: 5047 - protein, 15 aa, Prunus Dulcis
FQCAGVAASRITIQR

SEQ ID NO: 5048 - protein, 15 aa, Prunus Dulcis
QEDFQCAGVAASRIT

SEQ ID NO: 5049 - protein, 15 aa, Prunus Dulcis
LPDEVLANAYQISRE

SEQ ID NO: 5050 - protein, 15 aa, Prunus Dulcis
RTSFLRALPDEVLAN

SEQ ID NO: 5051 - protein, 15 aa, Prunus Dulcis
REQARQLKYNRQETI

SEQ ID NO: 5052 - protein, 15 aa, Sesamum indicum
GENPESFFKSFSDEI

SEQ ID NO: 5053 - protein, 15 aa, Sesamum indicum
LQVLCFEVNANNNEK

SEQ ID NO: 5054 - protein, 15 aa, Sesamum indicum
QPVSTPGEFELFFGA

SEQ ID NO: 5055 - protein, 15 aa, Sesamum indicum
ASESKDPELKQCKHQ

SEQ ID NO: 5056 - protein, 15 aa, Sesamum indicum
NLQVLCFEVNANNNE

SEQ ID NO: 5057 - protein, 15 aa, Sesamum indicum
CKHQCKAQQQISKEQ

SEQ ID NO: 5058 - protein, 15 aa, Sesamum indicum
PLAGYTSVIRAMPLQ

SEQ ID NO: 5059 - protein, 15 aa, Sesamum indicum
LAGYTSVIRAMPLQV

SEQ ID NO: 5060 - protein, 15 aa, Sesamum indicum
SAEKGNLYSNALVSP

SEQ ID NO: 5061 - protein, 15 aa, Sesamum indicum
LHQKVHRLRQGDIVA

SEQ ID NO: 5062 - protein, 15 aa, Sesamum indicum
MRSPLAGYTSVIRAM

SEQ ID NO: 5063 - protein, 15 aa, Sesamum indicum
GLEETFCTMKFRTNV

SEQ ID NO: 5064 - protein, 15 aa, Sesamum indicum
GANGLEETLCTAKLR

SEQ ID NO: 5065 - protein, 15 aa, Sesamum indicum
AHSIIYITRGSGRFQ

SEQ ID NO: 5066 - protein, 15 aa, Sesamum indicum
RGSGRFQVVGHTGRS

SEQ ID NO: 5067 - protein, 15 aa, Sesamum indicum
WLRLSAEKGVLYRNG

SEQ ID NO: 5068 - protein, 15 aa, Sesamum indicum
ALLDTGNAANQLDQT

SEQ ID NO: 5069 - protein, 15 aa, Sesamum indicum
LSAEKGVLYRNGLVA

SEQ ID NO: 5070 - protein, 15 aa, Sesamum indicum
FWDRNNQQFECAGVA

SEQ ID NO: 5071 - protein, 15 aa, Sesamum indicum
GRFQVVGHTGRSVFD

SEQ ID NO: 5072 - protein, 15 aa, Sesamum indicum
NQLDQTFRHFFLAGN

SEQ ID NO: 5073 - protein, 15 aa, Sesamum indicum
SAEKGVLYRNGLVAP

SEQ ID NO: 5074 - protein, 15 aa, Sinapis alba
GRTSALRALPLEVIT

SEQ ID NO: 5075 - protein, 15 aa, Sinapis alba
PQSPQDNGLEETICS

SEQ ID NO: 5076 - protein, 15 aa, Sinapis alba
LDRNPRTFRLAGNNQ

SEQ ID NO: 5077 - protein, 15 aa, Vigna radiata
KPNTLLLPHHADADF

SEQ ID NO: 5078 - protein, 15 aa, Vigna radiata
VAINATSNLNFFAFG

SEQ ID NO: 5079 - protein, 15 aa, Vigna radiata
PVAINATSNLNFFAF

SEQ ID NO: 5080 - protein, 15 aa, Vigna radiata
NFFAFGINAENNQRN

SEQ ID NO: 5081 - protein, 15 aa, Vigna radiata
DDVFIIPATYPVAIN

SEQ ID NO: 5082 - protein, 15 aa, Vigna radiata
FFAFGINAENNQRNF

SEQ ID NO: 5083 - protein, 15 aa, Vigna radiata
KNPQLRDLDMFIRSV

SEQ ID NO: 5084 - protein, 15 aa, Vigna radiata
LLLPHHADADFLLVV

SEQ ID NO: 5085 - protein, 15 aa, Vigna radiata
SKPNTLLLPHHADAD

SEQ ID NO: 5086 - protein, 15 aa, Vigna radiata
EKNPQLRDLDMFIRS

SEQ ID NO: 5087 - protein, 15 aa, Onchocerca volvulus
RLEDELVHEKERYKN

SEQ ID NO: 5088 - protein, 15 aa, Blattella germanica
RLEDELVHEKEKYKY

SEQ ID NO: 5089 - protein, 15 aa, Chionoecetes opilio
RLEDELVNEKEKYKN

SEQ ID NO: 5090 - protein, 15 aa, Tyrophagus putrescentiae
RLEDELVHEKEKYES

SEQ ID NO: 5091 - protein, 15 aa, Euphausia superba
RLEDELVNEKEKYKG

SEQ ID NO: 5092 - protein, 15 aa, Euphausia pacifica
RLEDELVNEKEKYKG

SEQ ID NO: 5093 - protein, 15 aa, Dermatophagoides pteronyssinus
LEDELVHEKEKYKSI

SEQ ID NO: 5094 - protein, 15 aa, Ascaris lumbricoides
RLEDELVHEKERYKS

SEQ ID NO: 5095 - protein, 15 aa, Anisakis simplex
RLEDELVHEKERYKS

SEQ ID NO: 5096 - protein, 15 aa, Dermatophagoides farinae
RLEDELVHEKEKYKS

SEQ ID NO: 5097 - protein, 15 aa, Chortoglyphus arcuatus
RLEDELVHEKEKYKS

SEQ ID NO: 5098 - protein, 15 aa, Lepidoglyphus destructor
RLEDELVHEKEKYKS

SEQ ID NO: 5099 - protein, 15 aa, Blomia tropicalis
RLEDELVHEKEKYKS

SEQ ID NO: 5100 - protein, 15 aa, Macrobrachium rosenbergii
RLEDELVNEKEKYKS

SEQ ID NO: 5101 - protein, 15 aa, Crangon crangon
RLEDELVNEKEKYKS

SEQ ID NO: 5102 - protein, 15 aa, Scylla serrata
RLEDELVNEKEKYKS

SEQ ID NO: 5103 - protein, 15 aa, Penaeus japonicus
RLEDELVNEKEKYKS

SEQ ID NO: 5104 - protein, 15 aa, Pandalus borealis
RLEDELVNEKEKYKS

SEQ ID NO: 5105 - protein, 15 aa, Panulirus stimpsoni
RLEDELVNEKEKYKS

SEQ ID NO: 5106 - protein, 15 aa, Erimacrus isenbeckii
RLEDELVNEKEKYKS

SEQ ID NO: 5107 - protein, 15 aa, Paralithodes camtschaticus
RLEDELVNEKEKYKS

SEQ ID NO: 5108 - protein, 15 aa, Procambarus clarkii
RLEDELVNEKEKYKS

SEQ ID NO: 5109 - protein, 15 aa, Portunus sanguinolentus
RLEDELVNEKEKYKS

SEQ ID NO: 5110 - protein, 15 aa, Portunus trituberculatus
RLEDELVNEKEKYKS

SEQ ID NO: 5111 - protein, 15 aa, Litopenaeus vannamei
RLEDELVNEKEKYKS

SEQ ID NO: 5112 - protein, 15 aa, Penaeus aztecus
RLEDELVNEKEKYKS

SEQ ID NO: 5113 - protein, 15 aa, Eriocheir sinensis
RLEDELVNEKEKYKS

SEQ ID NO: 5114 - protein, 15 aa, Homarus americanus
RLEDELVNEKEKYKS

SEQ ID NO: 5115 - protein, 15 aa, Metapenaeus ensis
RLEDELVNEKEKYKS

SEQ ID NO: 5116 - protein, 15 aa, Portunus pelagicus
RLEDELVNEKEKYKS

SEQ ID NO: 5117 - protein, 15 aa, Oratosquilla oratoria
RLEDELVNEKEKYKS

SEQ ID NO: 5118 - protein, 15 aa, Penaeus monodon
RLEDELVNEKEKYKS

SEQ ID NO: 5119 - protein, 15 aa, Melicertus latisulcatus
RLEDELVNEKEKYKS

SEQ ID NO: 5120 - protein, 15 aa, Periplaneta fuliginosa
RLEDELVHEKEKYKF

SEQ ID NO: 5121 - protein, 15 aa, Periplaneta americana
RLEDELVHEKEKYKF

SEQ ID NO: 5122 - protein, 15 aa, Euphausia superba
LEDELVNEKEKYKGI

SEQ ID NO: 5123 - protein, 15 aa, Euphausia pacifica
LEDELVNEKEKYKGI

SEQ ID NO: 5124 - protein, 15 aa, Onchocerca volvulus
LEDELVHEKERYKNI

SEQ ID NO: 5125 - protein, 15 aa, Blattella germanica
LEDELVHEKEKYKYI

SEQ ID NO: 5126 - protein, 15 aa, Blomia tropicalis
LEDELVHEKEKYKSI

SEQ ID NO: 5127 - protein, 15 aa, Dermatophagoides farinae
LEDELVHEKEKYKSI

SEQ ID NO: 5128 - protein, 15 aa, Chortoglyphus arcuatus
LEDELVHEKEKYKSI

SEQ ID NO: 5129 - protein, 15 aa, Lepidoglyphus destructor
LEDELVHEKEKYKSI

SEQ ID NO: 5130 - protein, 15 aa, Periplaneta fuliginosa
LEDELVHEKEKYKFI

SEQ ID NO: 5131 - protein, 15 aa, Periplaneta americana
LEDELVHEKEKYKFI

SEQ ID NO: 5132 - protein, 15 aa, Ascaris lumbricoides
LEDELVHEKERYKSI

SEQ ID NO: 5133 - protein, 15 aa, Anisakis simplex
LEDELVHEKERYKSI

SEQ ID NO: 5134 - protein, 15 aa, Chionoecetes opilio
LEDELVNEKEKYKNI

SEQ ID NO: 5135 - protein, 15 aa, Tyrophagus putrescentiae
LEEELRVVGNNLKSL

SEQ ID NO: 5136 - protein, 15 aa, Periplaneta fuliginosa
LEEELRVVGNNLKSL

SEQ ID NO: 5137 - protein, 15 aa, Euphausia pacifica
LEEELRVVGNNLKSL

SEQ ID NO: 5138 - protein, 15 aa, Charybdis feriatus
LEEELRVVGNNLKSL

SEQ ID NO: 5139 - protein, 15 aa, Penaeus monodon
LEEELRVVGNNLKSL

SEQ ID NO: 5140 - protein, 15 aa, Oratosquilla oratoria
LEEELRVVGNNLKSL

SEQ ID NO: 5141 - protein, 15 aa, Onchocerca volvulus
LEEELRVVGNNLKSL

SEQ ID NO: 5142 - protein, 15 aa, Litopenaeus vannamei
LEEELRVVGNNLKSL

SEQ ID NO: 5143 - protein, 15 aa, Chironomus kiiensis
LEEELRVVGNNLKSL

SEQ ID NO: 5144 - protein, 15 aa, Chortoglyphus arcuatus
LEEELRVVGNNLKSL

SEQ ID NO: 5145 - protein, 15 aa, Procambarus clarkii
LEEELRVVGNNLKSL

SEQ ID NO: 5146 - protein, 15 aa, Paralithodes camtschaticus
LEEELRVVGNNLKSL

SEQ ID NO: 5147 - protein, 15 aa, Erimacrus isenbeckii
LEEELRVVGNNLKSL

SEQ ID NO: 5148 - protein, 15 aa, Periplaneta americana
LEEELRVVGNNLKSL

SEQ ID NO: 5149 - protein, 15 aa, Panulirus stimpsoni
LEEELRVVGNNLKSL

SEQ ID NO: 5150 - protein, 15 aa, Blattella germanica
LEEELRVVGNNLKSL

SEQ ID NO: 5151 - protein, 15 aa, Penaeus japonicus
LEEELRVVGNNLKSL

SEQ ID NO: 5152 - protein, 15 aa, Dermatophagoides pteronyssinus
LEEELRVVGNNLKSL

SEQ ID NO: 5153 - protein, 15 aa, Melicertus latisulcatus
LEEELRVVGNNLKSL

SEQ ID NO: 5154 - protein, 15 aa, Portunus pelagicus
LEEELRVVGNNLKSL

SEQ ID NO: 5155 - protein, 15 aa, Metapenaeus ensis
LEEELRVVGNNLKSL

SEQ ID NO: 5156 - protein, 15 aa, Homarus americanus
LEEELRVVGNNLKSL

SEQ ID NO: 5157 - protein, 15 aa, Eriocheir sinensis
LEEELRVVGNNLKSL

SEQ ID NO: 5158 - protein, 15 aa, Anisakis simplex
LEEELRVVGNNLKSL

SEQ ID NO: 5159 - protein, 15 aa, Dermatophagoides farinae
LEEELRVVGNNLKSL

SEQ ID NO: 5160 - protein, 15 aa, Penaeus aztecus
LEEELRVVGNNLKSL

SEQ ID NO: 5161 - protein, 15 aa, Euphausia superba
LEEELRVVGNNLKSL

SEQ ID NO: 5162 - protein, 15 aa, Portunus trituberculatus
LEEELRVVGNNLKSL

SEQ ID NO: 5163 - protein, 15 aa, Portunus sanguinolentus
LEEELRVVGNNLKSL

SEQ ID NO: 5164 - protein, 15 aa, Aedes aegypti
LEEELRVVGNNLKSL

SEQ ID NO: 5165 - protein, 15 aa, Pandalus borealis
LEEELRVVGNNLKSL

SEQ ID NO: 5166 - protein, 15 aa, Chionoecetes opilio
LEEELRVVGNNLKSL

SEQ ID NO: 5167 - protein, 15 aa, Lepidoglyphus destructor
LEEELRVVGNNLKSL

SEQ ID NO: 5168 - protein, 15 aa, Ascaris lumbricoides
LEEELRVVGNNLKSL

SEQ ID NO: 5169 - protein, 15 aa, Scylla serrata
LEEELRVVGNNLKSL

SEQ ID NO: 5170 - protein, 15 aa, Crangon crangon
LEEELRVVGNNLKSL

SEQ ID NO: 5171 - protein, 15 aa, Blomia tropicalis
LEEELRVVGNNLKSL

SEQ ID NO: 5172 - protein, 15 aa, Macrobrachium rosenbergii
LEEELRVVGNNLKSL

SEQ ID NO: 5173 - protein, 15 aa, Fulvia mutica
LTEELSVVGNNLKGL

SEQ ID NO: 5174 - protein, 15 aa, Haliotis sp.
LEEELKVVGNNMKSL

SEQ ID NO: 5175 - protein, 15 aa, Haliotis discus
LEEELKVVGNNMKSL

SEQ ID NO: 5176 - protein, 15 aa, Sepioteuthis lessoniana
LEEELKVVGNNMKSL

SEQ ID NO: 5177 - protein, 15 aa, Crassostrea virginica
LEEELKVVGNNMKSL

SEQ ID NO: 5178 - protein, 15 aa, Sepia esculenta
LEEELKVVGNNMKSL

SEQ ID NO: 5179 - protein, 15 aa, Octopus vulgaris
LEEELKVVGNNMKSL

SEQ ID NO: 5180 - protein, 15 aa, Helix aspersa
LEEELKVVGNNMKSL

SEQ ID NO: 5181 - protein, 15 aa, Ommastrephes bartramii
LEEELKVVGNNMKSL

SEQ ID NO: 5182 - protein, 15 aa, Haliotis diversicolor
LEEELKVVGNNMKSL

SEQ ID NO: 5183 - protein, 15 aa, Turbo cornutus
LEEELKVVGNNMKSL

SEQ ID NO: 5184 - protein, 15 aa, Todarodes pacificus
LEEELKVVGNNMKSL

SEQ ID NO: 5185 - protein, 15 aa, Lepisma saccharina
LEEELKVVGNSLKSL

SEQ ID NO: 5186 - protein, 15 aa, Lepisma saccharina
EEELKVVGNSLKSLE

SEQ ID NO: 5187 - protein, 15 aa, Onchocerca volvulus
RVVGNNLKSLEVSEE

SEQ ID NO: 5188 - protein, 15 aa, Crassostrea virginica
EELKVVGNNMKSLEI

SEQ ID NO: 5189 - protein, 15 aa, Sepia esculenta
EELKVVGNNMKSLEI

SEQ ID NO: 5190 - protein, 15 aa, Octopus vulgaris
EELKVVGNNMKSLEI

SEQ ID NO: 5191 - protein, 15 aa, Helix aspersa
EELKVVGNNMKSLEI

SEQ ID NO: 5192 - protein, 15 aa, Turbo cornutus
EELKVVGNNMKSLEI

SEQ ID NO: 5193 - protein, 15 aa, Ommastrephes bartramii
EELKVVGNNMKSLEI

SEQ ID NO: 5194 - protein, 15 aa, Haliotis diversicolor
EELKVVGNNMKSLEI

SEQ ID NO: 5195 - protein, 15 aa, Todarodes pacificus
EELKVVGNNMKSLEI

SEQ ID NO: 5196 - protein, 15 aa, Haliotis sp.
EELKVVGNNMKSLEI

SEQ ID NO: 5197 - protein, 15 aa, Haliotis discus
EELKVVGNNMKSLEI

SEQ ID NO: 5198 - protein, 15 aa, Sepioteuthis lessoniana
EELKVVGNNMKSLEI

SEQ ID NO: 5199 - protein, 15 aa, Oratosquilla oratoria
EELRVVGNNLKSLEV

SEQ ID NO: 5200 - protein, 15 aa, Penaeus monodon
EELRVVGNNLKSLEV

SEQ ID NO: 5201 - protein, 15 aa, Charybdis feriatus
EELRVVGNNLKSLEV

SEQ ID NO: 5202 - protein, 15 aa, Euphausia pacifica
EELRVVGNNLKSLEV

SEQ ID NO: 5203 - protein, 15 aa, Periplaneta fuliginosa
EELRVVGNNLKSLEV

SEQ ID NO: 5204 - protein, 15 aa, Tyrophagus putrescentiae
EELRVVGNNLKSLEV

SEQ ID NO: 5205 - protein, 15 aa, Litopenaeus vannamei
EELRVVGNNLKSLEV

SEQ ID NO: 5206 - protein, 15 aa, Onchocerca volvulus
EELRVVGNNLKSLEV

SEQ ID NO: 5207 - protein, 15 aa, Blattella germanica
EELRVVGNNLKSLEV

SEQ ID NO: 5208 - protein, 15 aa, Panulirus stimpsoni
EELRVVGNNLKSLEV

SEQ ID NO: 5209 - protein, 15 aa, Periplaneta americana
EELRVVGNNLKSLEV

SEQ ID NO: 5210 - protein, 15 aa, Erimacrus isenbeckii
EELRVVGNNLKSLEV

SEQ ID NO: 5211 - protein, 15 aa, Paralithodes camtschaticus
EELRVVGNNLKSLEV

SEQ ID NO: 5212 - protein, 15 aa, Procambarus clarkii
EELRVVGNNLKSLEV

SEQ ID NO: 5213 - protein, 15 aa, Chortoglyphus arcuatus
EELRVVGNNLKSLEV

SEQ ID NO: 5214 - protein, 15 aa, Chironomus kiiensis
EELRVVGNNLKSLEV

SEQ ID NO: 5215 - protein, 15 aa, Dermatophagoides pteronyssinus
EELRVVGNNLKSLEV

SEQ ID NO: 5216 - protein, 15 aa, Penaeus japonicus
EELRVVGNNLKSLEV

SEQ ID NO: 5217 - protein, 15 aa, Eriocheir sinensis
EELRVVGNNLKSLEV

SEQ ID NO: 5218 - protein, 15 aa, Homarus americanus
EELRVVGNNLKSLEV

SEQ ID NO: 5219 - protein, 15 aa, Portunus pelagicus
EELRVVGNNLKSLEV

SEQ ID NO: 5220 - protein, 15 aa, Metapenaeus ensis
EELRVVGNNLKSLEV

SEQ ID NO: 5221 - protein, 15 aa, Melicertus latisulcatus
EELRVVGNNLKSLEV

SEQ ID NO: 5222 - protein, 15 aa, Euphausia superba
EELRVVGNNLKSLEV

SEQ ID NO: 5223 - protein, 15 aa, Dermatophagoides farinae
EELRVVGNNLKSLEV

SEQ ID NO: 5224 - protein, 15 aa, Penaeus aztecus
EELRVVGNNLKSLEV

SEQ ID NO: 5225 - protein, 15 aa, Anisakis simplex
EELRVVGNNLKSLEV

SEQ ID NO: 5226 - protein, 15 aa, Pandalus borealis
EELRVVGNNLKSLEV

SEQ ID NO: 5227 - protein, 15 aa, Aedes aegypti
EELRVVGNNLKSLEV

SEQ ID NO: 5228 - protein, 15 aa, Portunus sanguinolentus
EELRVVGNNLKSLEV

SEQ ID NO: 5229 - protein, 15 aa, Portunus trituberculatus
EELRVVGNNLKSLEV

SEQ ID NO: 5230 - protein, 15 aa, Macrobrachium rosenbergii
EELRVVGNNLKSLEV

SEQ ID NO: 5231 - protein, 15 aa, Blomia tropicalis
EELRVVGNNLKSLEV

SEQ ID NO: 5232 - protein, 15 aa, Crangon crangon
EELRVVGNNLKSLEV

SEQ ID NO: 5233 - protein, 15 aa, Scylla serrata
EELRVVGNNLKSLEV

SEQ ID NO: 5234 - protein, 15 aa, Ascaris lumbricoides
EELRVVGNNLKSLEV

SEQ ID NO: 5235 - protein, 15 aa, Lepidoglyphus destructor
EELRVVGNNLKSLEV

SEQ ID NO: 5236 - protein, 15 aa, Chionoecetes opilio
EELRVVGNNLKSLEV

SEQ ID NO: 5237 - protein, 15 aa, Sepioteuthis lessoniana
EEELKVVGNNMKSLE

SEQ ID NO: 5238 - protein, 15 aa, Haliotis discus
EEELKVVGNNMKSLE

SEQ ID NO: 5239 - protein, 15 aa, Haliotis sp.
EEELKVVGNNMKSLE

SEQ ID NO: 5240 - protein, 15 aa, Turbo cornutus
EEELKVVGNNMKSLE

SEQ ID NO: 5241 - protein, 15 aa, Haliotis diversicolor
EEELKVVGNNMKSLE

SEQ ID NO: 5242 - protein, 15 aa, Ommastrephes bartramii
EEELKVVGNNMKSLE

SEQ ID NO: 5243 - protein, 15 aa, Todarodes pacificus
EEELKVVGNNMKSLE

SEQ ID NO: 5244 - protein, 15 aa, Crassostrea virginica
EEELKVVGNNMKSLE

SEQ ID NO: 5245 - protein, 15 aa, Helix aspersa
EEELKVVGNNMKSLE

SEQ ID NO: 5246 - protein, 15 aa, Sepia esculenta
EEELKVVGNNMKSLE

SEQ ID NO: 5247 - protein, 15 aa, Octopus vulgaris
EEELKVVGNNMKSLE

SEQ ID NO: 5248 - protein, 15 aa, Lepisma saccharina
EELKVVGNSLKSLEV

SEQ ID NO: 5249 - protein, 15 aa, Litopenaeus vannamei
EEELRVVGNNLKSLE

SEQ ID NO: 5250 - protein, 15 aa, Onchocerca volvulus
EEELRVVGNNLKSLE

SEQ ID NO: 5251 - protein, 15 aa, Penaeus monodon
EEELRVVGNNLKSLE

SEQ ID NO: 5252 - protein, 15 aa, Oratosquilla oratoria
EEELRVVGNNLKSLE

SEQ ID NO: 5253 - protein, 15 aa, Tyrophagus putrescentiae
EEELRVVGNNLKSLE

SEQ ID NO: 5254 - protein, 15 aa, Periplaneta fuliginosa
EEELRVVGNNLKSLE

SEQ ID NO: 5255 - protein, 15 aa, Euphausia pacifica
EEELRVVGNNLKSLE

SEQ ID NO: 5256 - protein, 15 aa, Charybdis feriatus
EEELRVVGNNLKSLE

SEQ ID NO: 5257 - protein, 15 aa, Dermatophagoides pteronyssinus
EEELRVVGNNLKSLE

SEQ ID NO: 5258 - protein, 15 aa, Penaeus japonicus
EEELRVVGNNLKSLE

SEQ ID NO: 5259 - protein, 15 aa, Paralithodes camtschaticus
EEELRVVGNNLKSLE

SEQ ID NO: 5260 - protein, 15 aa, Erimacrus isenbeckii
EEELRVVGNNLKSLE

SEQ ID NO: 5261 - protein, 15 aa, Periplaneta americana
EEELRVVGNNLKSLE

SEQ ID NO: 5262 - protein, 15 aa, Panulirus stimpsoni
EEELRVVGNNLKSLE

SEQ ID NO: 5263 - protein, 15 aa, Blattella germanica
EEELRVVGNNLKSLE

SEQ ID NO: 5264 - protein, 15 aa, Chironomus kiiensis
EEELRVVGNNLKSLE

SEQ ID NO: 5265 - protein, 15 aa, Procambarus clarkii
EEELRVVGNNLKSLE

SEQ ID NO: 5266 - protein, 15 aa, Chortoglyphus arcuatus
EEELRVVGNNLKSLE

SEQ ID NO: 5267 - protein, 15 aa, Euphausia superba
EEELRVVGNNLKSLE

SEQ ID NO: 5268 - protein, 15 aa, Anisakis simplex
EEELRVVGNNLKSLE

SEQ ID NO: 5269 - protein, 15 aa, Dermatophagoides farinae
EEELRVVGNNLKSLE

SEQ ID NO: 5270 - protein, 15 aa, Penaeus aztecus
EEELRVVGNNLKSLE

SEQ ID NO: 5271 - protein, 15 aa, Portunus pelagicus
EEELRVVGNNLKSLE

SEQ ID NO: 5272 - protein, 15 aa, Metapenaeus ensis
EEELRVVGNNLKSLE

SEQ ID NO: 5273 - protein, 15 aa, Homarus americanus
EEELRVVGNNLKSLE

SEQ ID NO: 5274 - protein, 15 aa, Eriocheir sinensis
EEELRVVGNNLKSLE

SEQ ID NO: 5275 - protein, 15 aa, Melicertus latisulcatus
EEELRVVGNNLKSLE

SEQ ID NO: 5276 - protein, 15 aa, Scylla serrata
EEELRVVGNNLKSLE

SEQ ID NO: 5277 - protein, 15 aa, Crangon crangon
EEELRVVGNNLKSLE

SEQ ID NO: 5278 - protein, 15 aa, Blomia tropicalis
EEELRVVGNNLKSLE

SEQ ID NO: 5279 - protein, 15 aa, Macrobrachium rosenbergii
EEELRVVGNNLKSLE

SEQ ID NO: 5280 - protein, 15 aa, Chionoecetes opilio
EEELRVVGNNLKSLE

SEQ ID NO: 5281 - protein, 15 aa, Lepidoglyphus destructor
EEELRVVGNNLKSLE

SEQ ID NO: 5282 - protein, 15 aa, Ascaris lumbricoides
EEELRVVGNNLKSLE

SEQ ID NO: 5283 - protein, 15 aa, Aedes aegypti
EEELRVVGNNLKSLE

SEQ ID NO: 5284 - protein, 15 aa, Pandalus borealis
EEELRVVGNNLKSLE

SEQ ID NO: 5285 - protein, 15 aa, Portunus trituberculatus
EEELRVVGNNLKSLE

SEQ ID NO: 5286 - protein, 15 aa, Portunus sanguinolentus
EEELRVVGNNLKSLE

SEQ ID NO: 5287 - protein, 15 aa, Octopus vulgaris
ELEEELKVVGNNMKS

SEQ ID NO: 5288 - protein, 15 aa, Sepia esculenta
ELEEELKVVGNNMKS

SEQ ID NO: 5289 - protein, 15 aa, Todarodes pacificus
ELEEELKVVGNNMKS

SEQ ID NO: 5290 - protein, 15 aa, Ommastrephes bartramii
ELEEELKVVGNNMKS

SEQ ID NO: 5291 - protein, 15 aa, Sepioteuthis lessoniana
ELEEELKVVGNNMKS

SEQ ID NO: 5292 - protein, 15 aa, Euphausia superba
ELEEELRVVGNNLKS

SEQ ID NO: 5293 - protein, 15 aa, Dermatophagoides farinae
ELEEELRVVGNNLKS

SEQ ID NO: 5294 - protein, 15 aa, Penaeus aztecus
ELEEELRVVGNNLKS

SEQ ID NO: 5295 - protein, 15 aa, Anisakis simplex
ELEEELRVVGNNLKS

SEQ ID NO: 5296 - protein, 15 aa, Homarus americanus
ELEEELRVVGNNLKS

SEQ ID NO: 5297 - protein, 15 aa, Eriocheir sinensis
ELEEELRVVGNNLKS

SEQ ID NO: 5298 - protein, 15 aa, Portunus pelagicus
ELEEELRVVGNNLKS

SEQ ID NO: 5299 - protein, 15 aa, Metapenaeus ensis
ELEEELRVVGNNLKS

SEQ ID NO: 5300 - protein, 15 aa, Melicertus latisulcatus
ELEEELRVVGNNLKS

SEQ ID NO: 5301 - protein, 15 aa, Crangon crangon
ELEEELRVVGNNLKS

SEQ ID NO: 5302 - protein, 15 aa, Blomia tropicalis
ELEEELRVVGNNLKS

SEQ ID NO: 5303 - protein, 15 aa, Macrobrachium rosenbergii
ELEEELRVVGNNLKS

SEQ ID NO: 5304 - protein, 15 aa, Scylla serrata
ELEEELRVVGNNLKS

SEQ ID NO: 5305 - protein, 15 aa, Ascaris lumbricoides
ELEEELRVVGNNLKS

SEQ ID NO: 5306 - protein, 15 aa, Chionoecetes opilio
ELEEELRVVGNNLKS

SEQ ID NO: 5307 - protein, 15 aa, Lepidoglyphus destructor
ELEEELRVVGNNLKS

SEQ ID NO: 5308 - protein, 15 aa, Pandalus borealis
ELEEELRVVGNNLKS

SEQ ID NO: 5309 - protein, 15 aa, Aedes aegypti
ELEEELRVVGNNLKS

SEQ ID NO: 5310 - protein, 15 aa, Portunus sanguinolentus
ELEEELRVVGNNLKS

SEQ ID NO: 5311 - protein, 15 aa, Portunus trituberculatus
ELEEELRVVGNNLKS

SEQ ID NO: 5312 - protein, 15 aa, Litopenaeus vannamei
ELEEELRVVGNNLKS

SEQ ID NO: 5313 - protein, 15 aa, Penaeus monodon
ELEEELRVVGNNLKS

SEQ ID NO: 5314 - protein, 15 aa, Oratosquilla oratoria
ELEEELRVVGNNLKS

SEQ ID NO: 5315 - protein, 15 aa, Euphausia pacifica
ELEEELRVVGNNLKS

SEQ ID NO: 5316 - protein, 15 aa, Charybdis feriatus
ELEEELRVVGNNLKS

SEQ ID NO: 5317 - protein, 15 aa, Tyrophagus putrescentiae
ELEEELRVVGNNLKS

SEQ ID NO: 5318 - protein, 15 aa, Periplaneta fuliginosa
ELEEELRVVGNNLKS

SEQ ID NO: 5319 - protein, 15 aa, Dermatophagoides pteronyssinus
ELEEELRVVGNNLKS

SEQ ID NO: 5320 - protein, 15 aa, Penaeus japonicus
ELEEELRVVGNNLKS

SEQ ID NO: 5321 - protein, 15 aa, Periplaneta americana
ELEEELRVVGNNLKS

SEQ ID NO: 5322 - protein, 15 aa, Panulirus stimpsoni
ELEEELRVVGNNLKS

SEQ ID NO: 5323 - protein, 15 aa, Blattella germanica
ELEEELRVVGNNLKS

SEQ ID NO: 5324 - protein, 15 aa, Paralithodes camtschaticus
ELEEELRVVGNNLKS

SEQ ID NO: 5325 - protein, 15 aa, Erimacrus isenbeckii
ELEEELRVVGNNLKS

SEQ ID NO: 5326 - protein, 15 aa, Chortoglyphus arcuatus
ELEEELRVVGNNLKS

SEQ ID NO: 5327 - protein, 15 aa, Procambarus clarkii
ELEEELRVVGNNLKS

SEQ ID NO: 5328 - protein, 15 aa, Chironomus kiiensis
ELEEELRVVGNNLKS

SEQ ID NO: 5329 - protein, 15 aa, Tyrophagus putrescentiae
LEDELVHEKEKYESI

SEQ ID NO: 5330 - protein, 15 aa, Perna viridis
RLEDELLTEKEKYKA

SEQ ID NO: 5331 - protein, 15 aa, Melicertus latisulcatus
LEDELVNEKEKYKSI

SEQ ID NO: 5332 - protein, 15 aa, Penaeus monodon
LEDELVNEKEKYKSI

SEQ ID NO: 5333 - protein, 15 aa, Metapenaeus ensis
LEDELVNEKEKYKSI

SEQ ID NO: 5334 - protein, 15 aa, Oratosquilla oratoria
LEDELVNEKEKYKSI

SEQ ID NO: 5335 - protein, 15 aa, Homarus americanus
LEDELVNEKEKYKSI

SEQ ID NO: 5336 - protein, 15 aa, Eriocheir sinensis
LEDELVNEKEKYKSI

SEQ ID NO: 5337 - protein, 15 aa, Penaeus aztecus
LEDELVNEKEKYKSI

SEQ ID NO: 5338 - protein, 15 aa, Litopenaeus vannamei
LEDELVNEKEKYKSI

SEQ ID NO: 5339 - protein, 15 aa, Portunus trituberculatus
LEDELVNEKEKYKSI

SEQ ID NO: 5340 - protein, 15 aa, Procambarus clarkii
LEDELVNEKEKYKSI

SEQ ID NO: 5341 - protein, 15 aa, Portunus sanguinolentus
LEDELVNEKEKYKSI

SEQ ID NO: 5342 - protein, 15 aa, Paralithodes camtschaticus
LEDELVNEKEKYKSI

SEQ ID NO: 5343 - protein, 15 aa, Erimacrus isenbeckii
LEDELVNEKEKYKSI

SEQ ID NO: 5344 - protein, 15 aa, Pandalus borealis
LEDELVNEKEKYKSI

SEQ ID NO: 5345 - protein, 15 aa, Panulirus stimpsoni
LEDELVNEKEKYKSI

SEQ ID NO: 5346 - protein, 15 aa, Penaeus japonicus
LEDELVNEKEKYKSI

SEQ ID NO: 5347 - protein, 15 aa, Scylla serrata
LEDELVNEKEKYKSI

SEQ ID NO: 5348 - protein, 15 aa, Crangon crangon
LEDELVNEKEKYKSI

SEQ ID NO: 5349 - protein, 15 aa, Macrobrachium rosenbergii
LEDELVNEKEKYKSI

SEQ ID NO: 5350 - protein, 15 aa, Portunus pelagicus
LEDELVNEKEKYKST

SEQ ID NO: 5351 - protein, 15 aa, Balanus rostratus
RLEDELLAEKEKYKA

SEQ ID NO: 5352 - protein, 15 aa, Haliotis diversicolor
RLEDELLAEKEKYKA

SEQ ID NO: 5353 - protein, 15 aa, Turbo cornutus
RLEDELLAEKEKYKA

SEQ ID NO: 5354 - protein, 15 aa, Venerupis philippinarum
RLEDELLAEKEKYKA

SEQ ID NO: 5355 - protein, 15 aa, Haliotis sp.
RLEDELLAEKEKYKA

SEQ ID NO: 5356 - protein, 15 aa, Haliotis discus
RLEDELLAEKEKYKA

SEQ ID NO: 5357 - protein, 15 aa, Tresus keenae
RLEDELLAEKEKYKQ

SEQ ID NO: 5358 - protein, 15 aa, Solen strictus
RLEDELLAEKEKYKQ

SEQ ID NO: 5359 - protein, 15 aa, Fulvia mutica
RLEDELLQEKEKYKQ

SEQ ID NO: 5360 - protein, 15 aa, Sinonovacula constricta
RLEDELLQEKEKYKQ

SEQ ID NO: 5361 - protein, 15 aa, Fulvia mutica
LEDELLQEKEKYKQI

SEQ ID NO: 5362 - protein, 15 aa, Sinonovacula constricta
LEDELLQEKEKYKQI

SEQ ID NO: 5363 - protein, 15 aa, Pseudocardium sachalinense
LEDELLAEKEKYKTI

SEQ ID NO: 5364 - protein, 15 aa, Aedes aegypti
LEDELVMEKEKYREI

SEQ ID NO: 5365 - protein, 15 aa, Aedes aegypti
RLEDELVMEKEKYRE

SEQ ID NO: 5366 - protein, 15 aa, Haliotis discus
LEDELLAEKEKYKAI

SEQ ID NO: 5367 - protein, 15 aa, Haliotis sp.
LEDELLAEKEKYKAI

SEQ ID NO: 5368 - protein, 15 aa, Venerupis philippinarum
LEDELLAEKEKYKAI

SEQ ID NO: 5369 - protein, 15 aa, Turbo cornutus
LEDELLAEKEKYKAI

SEQ ID NO: 5370 - protein, 15 aa, Haliotis diversicolor
LEDELLAEKEKYKAI

SEQ ID NO: 5371 - protein, 15 aa, Balanus rostratus
LEDELLAEKEKYKAI

SEQ ID NO: 5372 - protein, 15 aa, Tresus keenae
LEDELLAEKEKYKQI

SEQ ID NO: 5373 - protein, 15 aa, Solen strictus
LEDELLAEKEKYKQI

SEQ ID NO: 5374 - protein, 15 aa, Chironomus kiiensis
LEDELVSEKEKYREI

SEQ ID NO: 5375 - protein, 15 aa, Chironomus kiiensis
RLEDELVSEKEKYRE

SEQ ID NO: 5376 - protein, 15 aa, Pseudocardium sachalinense
RLEDELLAEKEKYKT

SEQ ID NO: 5377 - protein, 15 aa, Perna viridis
LEDELLTEKEKYKAI

SEQ ID NO: 5378 - protein, 15 aa, Helix aspersa
ELEEELKVVGNNMKS

SEQ ID NO: 5379 - protein, 15 aa, Crassostrea virginica
ELEEELKVVGNNMKS

SEQ ID NO: 5380 - protein, 15 aa, Haliotis diversicolor
ELEEELKVVGNNMKS

SEQ ID NO: 5381 - protein, 15 aa, Turbo cornutus
ELEEELKVVGNNMKS

SEQ ID NO: 5382 - protein, 15 aa, Haliotis discus
ELEEELKVVGNNMKS

SEQ ID NO: 5383 - protein, 15 aa, Haliotis sp.
ELEEELKVVGNNMKS

SEQ ID NO: 5384 - protein, 15 aa, Helix aspersa
RLEDELLAEKERYKA

SEQ ID NO: 5385 - protein, 15 aa, Crassostrea gigas
RLEDELLAEKERYKA

SEQ ID NO: 5386 - protein, 15 aa, Octopus vulgaris
RLEDELLAEKERYKA

SEQ ID NO: 5387 - protein, 15 aa, Crassostrea virginica
RLEDELLAEKERYKA

SEQ ID NO: 5388 - protein, 15 aa, Scapharca broughtonii
RLEDELLAEKERYKA

SEQ ID NO: 5389 - protein, 15 aa, Mimachlamys nobilis
RLEDELLAEKERYKA

SEQ ID NO: 5390 - protein, 15 aa, Todarodes pacificus
RLEDELLAEKERYKS

SEQ ID NO: 5391 - protein, 15 aa, Sepia esculenta
RLEDELLAEKERYKS

SEQ ID NO: 5392 - protein, 15 aa, Neptunea polycostata
RLEDELLAEKERYKN

SEQ ID NO: 5393 - protein, 15 aa, Ommastrephes bartramii
RLEDELLAEKERYKT

SEQ ID NO: 5394 - protein, 15 aa, Sepioteuthis lessoniana
RLEDELLAEKERYKT

SEQ ID NO: 5395 - protein, 15 aa, Fulvia mutica
ELTEELSVVGNNLKG

SEQ ID NO: 5396 - protein, 15 aa, Onchocerca volvulus
ELEEELRVVGNNLKS

SEQ ID NO: 5397 - protein, 15 aa, Ommastrephes bartramii
IVELEEELKVVGNNM

SEQ ID NO: 5398 - protein, 15 aa, Sepioteuthis lessoniana
IVELEEELKVVGNNM

SEQ ID NO: 5399 - protein, 15 aa, Sepia esculenta
IVELEEELKVVGNNM

SEQ ID NO: 5400 - protein, 15 aa, Octopus vulgaris
IVELEEELKVVGNNM

SEQ ID NO: 5401 - protein, 15 aa, Todarodes pacificus
IVELEEELKVVGNNM

SEQ ID NO: 5402 - protein, 15 aa, Penaeus aztecus
ESKIVELEEELRVVG

SEQ ID NO: 5403 - protein, 15 aa, Dermatophagoides farinae
ESKIVELEEELRVVG

SEQ ID NO: 5404 - protein, 15 aa, Melicertus latisulcatus
ESKIVELEEELRVVG

SEQ ID NO: 5405 - protein, 15 aa, Homarus americanus
ESKIVELEEELRVVG

SEQ ID NO: 5406 - protein, 15 aa, Eriocheir sinensis
ESKIVELEEELRVVG

SEQ ID NO: 5407 - protein, 15 aa, Metapenaeus ensis
ESKIVELEEELRVVG

SEQ ID NO: 5408 - protein, 15 aa, Portunus pelagicus
ESKIVELEEELRVVG

SEQ ID NO: 5409 - protein, 15 aa, Lepidoglyphus destructor
ESKIVELEEELRVVG

SEQ ID NO: 5410 - protein, 15 aa, Chionoecetes opilio
ESKIVELEEELRVVG

SEQ ID NO: 5411 - protein, 15 aa, Crangon crangon
ESKIVELEEELRVVG

SEQ ID NO: 5412 - protein, 15 aa, Macrobrachium rosenbergii
ESKIVELEEELRVVG

SEQ ID NO: 5413 - protein, 15 aa, Scylla serrata
ESKIVELEEELRVVG

SEQ ID NO: 5414 - protein, 15 aa, Portunus sanguinolentus
ESKIVELEEELRVVG

SEQ ID NO: 5415 - protein, 15 aa, Portunus trituberculatus
ESKIVELEEELRVVG

SEQ ID NO: 5416 - protein, 15 aa, Pandalus borealis
ESKIVELEEELRVVG

SEQ ID NO: 5417 - protein, 15 aa, Litopenaeus vannamei
ESKIVELEEELRVVG

SEQ ID NO: 5418 - protein, 15 aa, Charybdis feriatus
ESKIVELEEELRVVG

SEQ ID NO: 5419 - protein, 15 aa, Tyrophagus putrescentiae
ESKIVELEEELRVVG

SEQ ID NO: 5420 - protein, 15 aa, Periplaneta fuliginosa
ESKIVELEEELRVVG

SEQ ID NO: 5421 - protein, 15 aa, Penaeus monodon
ESKIVELEEELRVVG

SEQ ID NO: 5422 - protein, 15 aa, Oratosquilla oratoria
ESKIVELEEELRVVG

SEQ ID NO: 5423 - protein, 15 aa, Penaeus japonicus
ESKIVELEEELRVVG

SEQ ID NO: 5424 - protein, 15 aa, Dermatophagoides pteronyssinus
ESKIVELEEELRVVG

SEQ ID NO: 5425 - protein, 15 aa, Chortoglyphus arcuatus
ESKIVELEEELRVVG

SEQ ID NO: 5426 - protein, 15 aa, Procambarus clarkii
ESKIVELEEELRVVG

SEQ ID NO: 5427 - protein, 15 aa, Periplaneta americana
ESKIVELEEELRVVG

SEQ ID NO: 5428 - protein, 15 aa, Blattella germanica
ESKIVELEEELRVVG

SEQ ID NO: 5429 - protein, 15 aa, Paralithodes camtschaticus
ESKIVELEEELRVVG

SEQ ID NO: 5430 - protein, 15 aa, Erimacrus isenbeckii
ESKIVELEEELRVVG

SEQ ID NO: 5431 - protein, 15 aa, Euphausia superba
NKIVELEEELRVVGN

SEQ ID NO: 5432 - protein, 15 aa, Anisakis simplex
NKIVELEEELRVVGN

SEQ ID NO: 5433 - protein, 15 aa, Euphausia pacifica
NKIVELEEELRVVGN

SEQ ID NO: 5434 - protein, 15 aa, Ascaris lumbricoides
NKIVELEEELRVVGN

SEQ ID NO: 5435 - protein, 15 aa, Chironomus kiiensis
IVELEEELRVVGNNL

SEQ ID NO: 5436 - protein, 15 aa, Panulirus stimpsoni
SKFVELEEELRVVGN

SEQ ID NO: 5437 - protein, 15 aa, Blomia tropicalis
TKIVELEEELRVVGN

SEQ ID NO: 5438 - protein, 15 aa, Penaeus japonicus
SKIVELEEELRVVGN

SEQ ID NO: 5439 - protein, 15 aa, Dermatophagoides pteronyssinus
SKIVELEEELRVVGN

SEQ ID NO: 5440 - protein, 15 aa, Procambarus clarkii
SKIVELEEELRVVGN

SEQ ID NO: 5441 - protein, 15 aa, Chortoglyphus arcuatus
SKIVELEEELRVVGN

SEQ ID NO: 5442 - protein, 15 aa, Erimacrus isenbeckii
SKIVELEEELRVVGN

SEQ ID NO: 5443 - protein, 15 aa, Paralithodes camtschaticus
SKIVELEEELRVVGN

SEQ ID NO: 5444 - protein, 15 aa, Blattella germanica
SKIVELEEELRVVGN

SEQ ID NO: 5445 - protein, 15 aa, Periplaneta americana
SKIVELEEELRVVGN

SEQ ID NO: 5446 - protein, 15 aa, Litopenaeus vannamei
SKIVELEEELRVVGN

SEQ ID NO: 5447 - protein, 15 aa, Periplaneta fuliginosa
SKIVELEEELRVVGN

SEQ ID NO: 5448 - protein, 15 aa, Tyrophagus putrescentiae
SKIVELEEELRVVGN

SEQ ID NO: 5449 - protein, 15 aa, Charybdis feriatus
SKIVELEEELRVVGN

SEQ ID NO: 5450 - protein, 15 aa, Oratosquilla oratoria
SKIVELEEELRVVGN

SEQ ID NO: 5451 - protein, 15 aa, Penaeus monodon
SKIVELEEELRVVGN

SEQ ID NO: 5452 - protein, 15 aa, Chionoecetes opilio
SKIVELEEELRVVGN

SEQ ID NO: 5453 - protein, 15 aa, Lepidoglyphus destructor
SKIVELEEELRVVGN

SEQ ID NO: 5454 - protein, 15 aa, Scylla serrata
SKIVELEEELRVVGN

SEQ ID NO: 5455 - protein, 15 aa, Macrobrachium rosenbergii
SKIVELEEELRVVGN

SEQ ID NO: 5456 - protein, 15 aa, Crangon crangon
SKIVELEEELRVVGN

SEQ ID NO: 5457 - protein, 15 aa, Portunus trituberculatus
SKIVELEEELRVVGN

SEQ ID NO: 5458 - protein, 15 aa, Portunus sanguinolentus
SKIVELEEELRVVGN

SEQ ID NO: 5459 - protein, 15 aa, Pandalus borealis
SKIVELEEELRVVGN

SEQ ID NO: 5460 - protein, 15 aa, Penaeus aztecus
SKIVELEEELRVVGN

SEQ ID NO: 5461 - protein, 15 aa, Dermatophagoides farinae
SKIVELEEELRVVGN

SEQ ID NO: 5462 - protein, 15 aa, Melicertus latisulcatus
SKIVELEEELRVVGN

SEQ ID NO: 5463 - protein, 15 aa, Metapenaeus ensis
SKIVELEEELRVVGN

SEQ ID NO: 5464 - protein, 15 aa, Portunus pelagicus
SKIVELEEELRVVGN

SEQ ID NO: 5465 - protein, 15 aa, Eriocheir sinensis
SKIVELEEELRVVGN

SEQ ID NO: 5466 - protein, 15 aa, Homarus americanus
SKIVELEEELRVVGN

SEQ ID NO: 5467 - protein, 15 aa, Panulirus stimpsoni
ESKFVELEEELRVVG

SEQ ID NO: 5468 - protein, 15 aa, Blomia tropicalis
ETKIVELEEELRVVG

SEQ ID NO: 5469 - protein, 15 aa, Aedes aegypti
GKIVELEEELRVVGN

SEQ ID NO: 5470 - protein, 15 aa, Aedes aegypti
EGKIVELEEELRVVG

SEQ ID NO: 5471 - protein, 15 aa, Anisakis simplex
ENKIVELEEELRVVG

SEQ ID NO: 5472 - protein, 15 aa, Euphausia pacifica
ENKIVELEEELRVVG

SEQ ID NO: 5473 - protein, 15 aa, Ascaris lumbricoides
ENKIVELEEELRVVG

SEQ ID NO: 5474 - protein, 15 aa, Euphausia superba
ENKIVELEEELRVVG

SEQ ID NO: 5475 - protein, 15 aa, Ascaris lumbricoides
DAIKKKMQAMKIEKD

SEQ ID NO: 5476 - protein, 15 aa, Onchocerca volvulus
DAIKKKMQAMKIEKD

SEQ ID NO: 5477 - protein, 15 aa, Anisakis simplex
DAIKKKMQAMKIEKD

SEQ ID NO: 5478 - protein, 15 aa, Blomia tropicalis
EAIKKKMQAMKLEKD

SEQ ID NO: 5479 - protein, 15 aa, Lepisma saccharina
EAIKKKMQAMKLEKD

SEQ ID NO: 5480 - protein, 15 aa, Dermatophagoides farinae
EAIKKKMQAMKLEKD

SEQ ID NO: 5481 - protein, 15 aa, Chortoglyphus arcuatus
EAIKKKMQAMKLEKD

SEQ ID NO: 5482 - protein, 15 aa, Periplaneta americana
EDELVHEKEKYKFIC

SEQ ID NO: 5483 - protein, 15 aa, Periplaneta fuliginosa
EDELVHEKEKYKFIC

SEQ ID NO: 5484 - protein, 15 aa, Dermatophagoides pteronyssinus
EAIKNKMQAMKLEKD

SEQ ID NO: 5485 - protein, 15 aa, Lepidoglyphus destructor
EAIKNKMQAMKLEKD

SEQ ID NO: 5486 - protein, 15 aa, Sinonovacula constricta
DAIKKKMQAMKIEKE

SEQ ID NO: 5487 - protein, 15 aa, Procambarus clarkii
DAIKKKMQATKLEKD

SEQ ID NO: 5488 - protein, 15 aa, Solen strictus
DSIKKKMQAMKLEKE

SEQ ID NO: 5489 - protein, 15 aa, Blattella germanica
EDELVHEKEKYKYIC

SEQ ID NO: 5490 - protein, 15 aa, Chironomus kiiensis
DAIKKKMQAMKLEKD

SEQ ID NO: 5491 - protein, 15 aa, Periplaneta americana
DAIKKKMQAMKLEKD

SEQ ID NO: 5492 - protein, 15 aa, Blattella germanica
DAIKKKMQAMKLEKD

SEQ ID NO: 5493 - protein, 15 aa, Paralithodes camtschaticus
DAIKKKMQAMKLEKD

SEQ ID NO: 5494 - protein, 15 aa, Erimacrus isenbeckii
DAIKKKMQAMKLEKD

SEQ ID NO: 5495 - protein, 15 aa, Penaeus japonicus
DAIKKKMQAMKLEKD

SEQ ID NO: 5496 - protein, 15 aa, Charybdis feriatus
DAIKKKMQAMKLEKD

SEQ ID NO: 5497 - protein, 15 aa, Periplaneta fuliginosa
DAIKKKMQAMKLEKD

SEQ ID NO: 5498 - protein, 15 aa, Penaeus monodon
DAIKKKMQAMKLEKD

SEQ ID NO: 5499 - protein, 15 aa, Oratosquilla oratoria
DAIKKKMQAMKLEKD

SEQ ID NO: 5500 - protein, 15 aa, Litopenaeus vannamei
DAIKKKMQAMKLEKD

SEQ ID NO: 5501 - protein, 15 aa, Portunus sanguinolentus
DAIKKKMQAMKLEKD

SEQ ID NO: 5502 - protein, 15 aa, Portunus trituberculatus
DAIKKKMQAMKLEKD

SEQ ID NO: 5503 - protein, 15 aa, Pandalus borealis
DAIKKKMQAMKLEKD

SEQ ID NO: 5504 - protein, 15 aa, Aedes aegypti
DAIKKKMQAMKLEKD

SEQ ID NO: 5505 - protein, 15 aa, Chionoecetes opilio
DAIKKKMQAMKLEKD

SEQ ID NO: 5506 - protein, 15 aa, Crangon crangon
DAIKKKMQAMKLEKD

SEQ ID NO: 5507 - protein, 15 aa, Macrobrachium rosenbergii
DAIKKKMQAMKLEKD

SEQ ID NO: 5508 - protein, 15 aa, Scylla serrata
DAIKKKMQAMKLEKD

SEQ ID NO: 5509 - protein, 15 aa, Melicertus latisulcatus
DAIKKKMQAMKLEKD

SEQ ID NO: 5510 - protein, 15 aa, Homarus americanus
DAIKKKMQAMKLEKD

SEQ ID NO: 5511 - protein, 15 aa, Eriocheir sinensis
DAIKKKMQAMKLEKD

SEQ ID NO: 5512 - protein, 15 aa, Portunus pelagicus
DAIKKKMQAMKLEKD

SEQ ID NO: 5513 - protein, 15 aa, Penaeus aztecus
DAIKKKMQAMKLEKD

SEQ ID NO: 5514 - protein, 15 aa, Balanus rostratus
DAIKKKMQAMKLEKE

SEQ ID NO: 5515 - protein, 15 aa, Venerupis philippinarum
DAIKKKMQAMKLEKE

SEQ ID NO: 5516 - protein, 15 aa, Fulvia mutica
EAIKKKMQSMKNEKE

SEQ ID NO: 5517 - protein, 15 aa, Euphausia superba
DAIKKKMQAMKMEKD

SEQ ID NO: 5518 - protein, 15 aa, Euphausia pacifica
DAIKKKMQAMKMEKD

SEQ ID NO: 5519 - protein, 15 aa, Ascaris lumbricoides
EDELVHEKERYKSIS

SEQ ID NO: 5520 - protein, 15 aa, Anisakis simplex
EDELVHEKERYKSIS

SEQ ID NO: 5521 - protein, 15 aa, Penaeus japonicus
AIKKKMQAMKLEKDN

SEQ ID NO: 5522 - protein, 15 aa, Chironomus kiiensis
AIKKKMQAMKLEKDN

SEQ ID NO: 5523 - protein, 15 aa, Paralithodes camtschaticus
AIKKKMQAMKLEKDN

SEQ ID NO: 5524 - protein, 15 aa, Erimacrus isenbeckii
AIKKKMQAMKLEKDN

SEQ ID NO: 5525 - protein, 15 aa, Periplaneta americana
AIKKKMQAMKLEKDN

SEQ ID NO: 5526 - protein, 15 aa, Blattella germanica
AIKKKMQAMKLEKDN

SEQ ID NO: 5527 - protein, 15 aa, Litopenaeus vannamei
AIKKKMQAMKLEKDN

SEQ ID NO: 5528 - protein, 15 aa, Periplaneta fuliginosa
AIKKKMQAMKLEKDN

SEQ ID NO: 5529 - protein, 15 aa, Charybdis feriatus
AIKKKMQAMKLEKDN

SEQ ID NO: 5530 - protein, 15 aa, Penaeus monodon
AIKKKMQAMKLEKDN

SEQ ID NO: 5531 - protein, 15 aa, Oratosquilla oratoria
AIKKKMQAMKLEKDN

SEQ ID NO: 5532 - protein, 15 aa, Chionoecetes opilio
AIKKKMQAMKLEKDN

SEQ ID NO: 5533 - protein, 15 aa, Scylla serrata
AIKKKMQAMKLEKDN

SEQ ID NO: 5534 - protein, 15 aa, Crangon crangon
AIKKKMQAMKLEKDN

SEQ ID NO: 5535 - protein, 15 aa, Macrobrachium rosenbergii
AIKKKMQAMKLEKDN

SEQ ID NO: 5536 - protein, 15 aa, Portunus trituberculatus
AIKKKMQAMKLEKDN

SEQ ID NO: 5537 - protein, 15 aa, Portunus sanguinolentus
AIKKKMQAMKLEKDN

SEQ ID NO: 5538 - protein, 15 aa, Aedes aegypti
AIKKKMQAMKLEKDN

SEQ ID NO: 5539 - protein, 15 aa, Pandalus borealis
AIKKKMQAMKLEKDN

SEQ ID NO: 5540 - protein, 15 aa, Penaeus aztecus
AIKKKMQAMKLEKDN

SEQ ID NO: 5541 - protein, 15 aa, Melicertus latisulcatus
AIKKKMQAMKLEKDN

SEQ ID NO: 5542 - protein, 15 aa, Homarus americanus
AIKKKMQAMKLEKDN

SEQ ID NO: 5543 - protein, 15 aa, Eriocheir sinensis
AIKKKMQAMKLEKDN

SEQ ID NO: 5544 - protein, 15 aa, Lepisma saccharina
ELKVVGNSLKSLEVS

SEQ ID NO: 5545 - protein, 15 aa, Eriocheir sinensis
ELRVVGNNLKSLEVS

SEQ ID NO: 5546 - protein, 15 aa, Homarus americanus
ELRVVGNNLKSLEVS

SEQ ID NO: 5547 - protein, 15 aa, Metapenaeus ensis
ELRVVGNNLKSLEVS

SEQ ID NO: 5548 - protein, 15 aa, Portunus pelagicus
ELRVVGNNLKSLEVS

SEQ ID NO: 5549 - protein, 15 aa, Melicertus latisulcatus
ELRVVGNNLKSLEVS

SEQ ID NO: 5550 - protein, 15 aa, Euphausia superba
ELRVVGNNLKSLEVS

SEQ ID NO: 5551 - protein, 15 aa, Penaeus aztecus
ELRVVGNNLKSLEVS

SEQ ID NO: 5552 - protein, 15 aa, Dermatophagoides farinae
ELRVVGNNLKSLEVS

SEQ ID NO: 5553 - protein, 15 aa, Anisakis simplex
ELRVVGNNLKSLEVS

SEQ ID NO: 5554 - protein, 15 aa, Pandalus borealis
ELRVVGNNLKSLEVS

SEQ ID NO: 5555 - protein, 15 aa, Aedes aegypti
ELRVVGNNLKSLEVS

SEQ ID NO: 5556 - protein, 15 aa, Portunus sanguinolentus
ELRVVGNNLKSLEVS

SEQ ID NO: 5557 - protein, 15 aa, Portunus trituberculatus
ELRVVGNNLKSLEVS

SEQ ID NO: 5558 - protein, 15 aa, Macrobrachium rosenbergii
ELRVVGNNLKSLEVS

SEQ ID NO: 5559 - protein, 15 aa, Blomia tropicalis
ELRVVGNNLKSLEVS

SEQ ID NO: 5560 - protein, 15 aa, Crangon crangon
ELRVVGNNLKSLEVS

SEQ ID NO: 5561 - protein, 15 aa, Scylla serrata
ELRVVGNNLKSLEVS

SEQ ID NO: 5562 - protein, 15 aa, Ascaris lumbricoides
ELRVVGNNLKSLEVS

SEQ ID NO: 5563 - protein, 15 aa, Chionoecetes opilio
ELRVVGNNLKSLEVS

SEQ ID NO: 5564 - protein, 15 aa, Lepidoglyphus destructor
ELRVVGNNLKSLEVS

SEQ ID NO: 5565 - protein, 15 aa, Oratosquilla oratoria
ELRVVGNNLKSLEVS

SEQ ID NO: 5566 - protein, 15 aa, Penaeus monodon
ELRVVGNNLKSLEVS

SEQ ID NO: 5567 - protein, 15 aa, Charybdis feriatus
ELRVVGNNLKSLEVS

SEQ ID NO: 5568 - protein, 15 aa, Euphausia pacifica
ELRVVGNNLKSLEVS

SEQ ID NO: 5569 - protein, 15 aa, Periplaneta fuliginosa
ELRVVGNNLKSLEVS

SEQ ID NO: 5570 - protein, 15 aa, Tyrophagus putrescentiae
ELRVVGNNLKSLEVS

SEQ ID NO: 5571 - protein, 15 aa, Litopenaeus vannamei
ELRVVGNNLKSLEVS

SEQ ID NO: 5572 - protein, 15 aa, Onchocerca volvulus
ELRVVGNNLKSLEVS

SEQ ID NO: 5573 - protein, 15 aa, Panulirus stimpsoni
ELRVVGNNLKSLEVS

SEQ ID NO: 5574 - protein, 15 aa, Blattella germanica
ELRVVGNNLKSLEVS

SEQ ID NO: 5575 - protein, 15 aa, Periplaneta americana
ELRVVGNNLKSLEVS

SEQ ID NO: 5576 - protein, 15 aa, Erimacrus isenbeckii
ELRVVGNNLKSLEVS

SEQ ID NO: 5577 - protein, 15 aa, Paralithodes camtschaticus
ELRVVGNNLKSLEVS

SEQ ID NO: 5578 - protein, 15 aa, Procambarus clarkii
ELRVVGNNLKSLEVS

SEQ ID NO: 5579 - protein, 15 aa, Chortoglyphus arcuatus
ELRVVGNNLKSLEVS

SEQ ID NO: 5580 - protein, 15 aa, Chironomus kiiensis
ELRVVGNNLKSLEVS

SEQ ID NO: 5581 - protein, 15 aa, Dermatophagoides pteronyssinus
ELRVVGNNLKSLEVS

SEQ ID NO: 5582 - protein, 15 aa, Penaeus japonicus
ELRVVGNNLKSLEVS

SEQ ID NO: 5583 - protein, 15 aa, Euphausia pacifica
AIKKKMQAMKMEKDS

SEQ ID NO: 5584 - protein, 15 aa, Euphausia superba
AIKKKMQAMKMEKDS

SEQ ID NO: 5585 - protein, 15 aa, Onchocerca volvulus
EDELVHEKERYKNIS

SEQ ID NO: 5586 - protein, 15 aa, Lepidoglyphus destructor
EDELVHEKEKYKSIS

SEQ ID NO: 5587 - protein, 15 aa, Dermatophagoides farinae
EDELVHEKEKYKSIS

SEQ ID NO: 5588 - protein, 15 aa, Chortoglyphus arcuatus
EDELVHEKEKYKSIS

SEQ ID NO: 5589 - protein, 15 aa, Dermatophagoides pteronyssinus
EDELVHEKEKYKSIS

SEQ ID NO: 5590 - protein, 15 aa, Blomia tropicalis
EDELVHEKEKYKSIS

SEQ ID NO: 5591 - protein, 15 aa, Ascaris lumbricoides
AIKKKMQAMKIEKDN

SEQ ID NO: 5592 - protein, 15 aa, Onchocerca volvulus
AIKKKMQAMKIEKDN

SEQ ID NO: 5593 - protein, 15 aa, Anisakis simplex
AIKKKMQAMKIEKDN

SEQ ID NO: 5594 - protein, 15 aa, Portunus pelagicus
AIKKKMQAMKLEKDD

SEQ ID NO: 5595 - protein, 15 aa, Helix aspersa
AIKKKMLAMKMEKEN

SEQ ID NO: 5596 - protein, 15 aa, Haliotis discus
AIKKKMLAMKMEKEN

SEQ ID NO: 5597 - protein, 15 aa, Haliotis sp.
AIKKKMLAMKMEKEN

SEQ ID NO: 5598 - protein, 15 aa, Turbo cornutus
AIKKKMLAMKMEKEN

SEQ ID NO: 5599 - protein, 15 aa, Haliotis diversicolor
AIKKKMLAMKMEKEN

SEQ ID NO: 5600 - protein, 15 aa, Perna viridis
AIKKKMVAMKMEKKN

SEQ ID NO: 5601 - protein, 15 aa, Ommastrephes bartramii
AIKKKMLAMKMEKEV

SEQ ID NO: 5602 - protein, 15 aa, Sepioteuthis lessoniana
AIKKKMLAMKMEKEV

SEQ ID NO: 5603 - protein, 15 aa, Todarodes pacificus
AIKKKMLAMKMEKEV

SEQ ID NO: 5604 - protein, 15 aa, Sepia esculenta
AIKKKMLAMKMEKEV

SEQ ID NO: 5605 - protein, 15 aa, Periplaneta americana
DELVHEKEKYKFICD

SEQ ID NO: 5606 - protein, 15 aa, Periplaneta fuliginosa
DELVHEKEKYKFICD

SEQ ID NO: 5607 - protein, 15 aa, Blattella germanica
DELVHEKEKYKYICD

SEQ ID NO: 5608 - protein, 15 aa, Chionoecetes opilio
EDELVNEKEKYKNIA

SEQ ID NO: 5609 - protein, 15 aa, Portunus pelagicus
EDELVNEKEKYKSTT

SEQ ID NO: 5610 - protein, 15 aa, Melicertus latisulcatus
EDELVNEKEKYKSIT

SEQ ID NO: 5611 - protein, 15 aa, Penaeus monodon
EDELVNEKEKYKSIT

SEQ ID NO: 5612 - protein, 15 aa, Oratosquilla oratoria
EDELVNEKEKYKSIT

SEQ ID NO: 5613 - protein, 15 aa, Metapenaeus ensis
EDELVNEKEKYKSIT

SEQ ID NO: 5614 - protein, 15 aa, Homarus americanus
EDELVNEKEKYKSIT

SEQ ID NO: 5615 - protein, 15 aa, Eriocheir sinensis
EDELVNEKEKYKSIT

SEQ ID NO: 5616 - protein, 15 aa, Penaeus aztecus
EDELVNEKEKYKSIT

SEQ ID NO: 5617 - protein, 15 aa, Litopenaeus vannamei
EDELVNEKEKYKSIT

SEQ ID NO: 5618 - protein, 15 aa, Portunus trituberculatus
EDELVNEKEKYKSIT

SEQ ID NO: 5619 - protein, 15 aa, Portunus sanguinolentus
EDELVNEKEKYKSIT

SEQ ID NO: 5620 - protein, 15 aa, Procambarus clarkii
EDELVNEKEKYKSIT

SEQ ID NO: 5621 - protein, 15 aa, Paralithodes camtschaticus
EDELVNEKEKYKSIT

SEQ ID NO: 5622 - protein, 15 aa, Erimacrus isenbeckii
EDELVNEKEKYKSIT

SEQ ID NO: 5623 - protein, 15 aa, Pandalus borealis
EDELVNEKEKYKSIT

SEQ ID NO: 5624 - protein, 15 aa, Panulirus stimpsoni
EDELVNEKEKYKSIT

SEQ ID NO: 5625 - protein, 15 aa, Penaeus japonicus
EDELVNEKEKYKSIT

SEQ ID NO: 5626 - protein, 15 aa, Scylla serrata
EDELVNEKEKYKSIT

SEQ ID NO: 5627 - protein, 15 aa, Crangon crangon
EDELVNEKEKYKSIT

SEQ ID NO: 5628 - protein, 15 aa, Macrobrachium rosenbergii
EDELVNEKEKYKSIT

SEQ ID NO: 5629 - protein, 15 aa, Tyrophagus putrescentiae
EDELVHEKEKYESIS

SEQ ID NO: 5630 - protein, 15 aa, Lepidoglyphus destructor
DELVHEKEKYKSISD

SEQ ID NO: 5631 - protein, 15 aa, Chortoglyphus arcuatus
DELVHEKEKYKSISD

SEQ ID NO: 5632 - protein, 15 aa, Dermatophagoides farinae
DELVHEKEKYKSISD

SEQ ID NO: 5633 - protein, 15 aa, Dermatophagoides pteronyssinus
DELVHEKEKYKSISD

SEQ ID NO: 5634 - protein, 15 aa, Blomia tropicalis
DELVHEKEKYKSISD

SEQ ID NO: 5635 - protein, 15 aa, Euphausia superba
EDELVNEKEKYKGIT

SEQ ID NO: 5636 - protein, 15 aa, Euphausia pacifica
EDELVNEKEKYKGIT

SEQ ID NO: 5637 - protein, 15 aa, Penaeus aztecus
DELVNEKEKYKSITD

SEQ ID NO: 5638 - protein, 15 aa, Litopenaeus vannamei
DELVNEKEKYKSITD

SEQ ID NO: 5639 - protein, 15 aa, Melicertus latisulcatus
DELVNEKEKYKSITD

SEQ ID NO: 5640 - protein, 15 aa, Homarus americanus
DELVNEKEKYKSITD

SEQ ID NO: 5641 - protein, 15 aa, Eriocheir sinensis
DELVNEKEKYKSITD

SEQ ID NO: 5642 - protein, 15 aa, Penaeus monodon
DELVNEKEKYKSITD

SEQ ID NO: 5643 - protein, 15 aa, Oratosquilla oratoria
DELVNEKEKYKSITD

SEQ ID NO: 5644 - protein, 15 aa, Metapenaeus ensis
DELVNEKEKYKSITD

SEQ ID NO: 5645 - protein, 15 aa, Penaeus japonicus
DELVNEKEKYKSITD

SEQ ID NO: 5646 - protein, 15 aa, Crangon crangon
DELVNEKEKYKSITD

SEQ ID NO: 5647 - protein, 15 aa, Macrobrachium rosenbergii
DELVNEKEKYKSITD

SEQ ID NO: 5648 - protein, 15 aa, Scylla serrata
DELVNEKEKYKSITD

SEQ ID NO: 5649 - protein, 15 aa, Procambarus clarkii
DELVNEKEKYKSITD

SEQ ID NO: 5650 - protein, 15 aa, Portunus sanguinolentus
DELVNEKEKYKSITD

SEQ ID NO: 5651 - protein, 15 aa, Portunus trituberculatus
DELVNEKEKYKSITD

SEQ ID NO: 5652 - protein, 15 aa, Panulirus stimpsoni
DELVNEKEKYKSITD

SEQ ID NO: 5653 - protein, 15 aa, Pandalus borealis
DELVNEKEKYKSITD

SEQ ID NO: 5654 - protein, 15 aa, Paralithodes camtschaticus
DELVNEKEKYKSITD

SEQ ID NO: 5655 - protein, 15 aa, Erimacrus isenbeckii
DELVNEKEKYKSITD

SEQ ID NO: 5656 - protein, 15 aa, Onchocerca volvulus
DELVHEKERYKNISE

SEQ ID NO: 5657 - protein, 15 aa, Anisakis simplex
DELVHEKERYKSISE

SEQ ID NO: 5658 - protein, 15 aa, Ascaris lumbricoides
DELVHEKERYKSISE

SEQ ID NO: 5659 - protein, 15 aa, Tyrophagus putrescentiae
DELVHEKEKYESISD

SEQ ID NO: 5660 - protein, 15 aa, Todarodes pacificus
EDELLAEKERYKSIS

SEQ ID NO: 5661 - protein, 15 aa, Sepia esculenta
EDELLAEKERYKSIS

SEQ ID NO: 5662 - protein, 15 aa, Onchocerca volvulus
QLLAEEADRKYDEVA

SEQ ID NO: 5663 - protein, 15 aa, Chironomus kiiensis
ARFLAEEADKKYDEV

SEQ ID NO: 5664 - protein, 15 aa, Euphausia pacifica
RLLAEEADRKYDEVA

SEQ ID NO: 5665 - protein, 15 aa, Euphausia superba
RLLAEEADRKYDEVA

SEQ ID NO: 5666 - protein, 15 aa, Blattella germanica
KEARFMAEEADKKYD

SEQ ID NO: 5667 - protein, 15 aa, Periplaneta americana
KEARFMAEEADKKYD

SEQ ID NO: 5668 - protein, 15 aa, Aedes aegypti
KEARFMAEEADKKYD

SEQ ID NO: 5669 - protein, 15 aa, Periplaneta fuliginosa
KEARFMAEEADKKYD

SEQ ID NO: 5670 - protein, 15 aa, Portunus trituberculatus
QAMKLEKDNAMDRAN

SEQ ID NO: 5671 - protein, 15 aa, Euphausia superba
ARLLAEEADRKYDEV

SEQ ID NO: 5672 - protein, 15 aa, Euphausia pacifica
ARLLAEEADRKYDEV

SEQ ID NO: 5673 - protein, 15 aa, Chionoecetes opilio
KEARFLAEEADRKYD

SEQ ID NO: 5674 - protein, 15 aa, Penaeus japonicus
KEARFLAEEADRKYD

SEQ ID NO: 5675 - protein, 15 aa, Scylla serrata
KEARFLAEEADRKYD

SEQ ID NO: 5676 - protein, 15 aa, Macrobrachium rosenbergii
KEARFLAEEADRKYD

SEQ ID NO: 5677 - protein, 15 aa, Crangon crangon
KEARFLAEEADRKYD

SEQ ID NO: 5678 - protein, 15 aa, Portunus trituberculatus
KEARFLAEEADRKYD

SEQ ID NO: 5679 - protein, 15 aa, Portunus sanguinolentus
KEARFLAEEADRKYD

SEQ ID NO: 5680 - protein, 15 aa, Procambarus clarkii
KEARFLAEEADRKYD

SEQ ID NO: 5681 - protein, 15 aa, Erimacrus isenbeckii
KEARFLAEEADRKYD

SEQ ID NO: 5682 - protein, 15 aa, Paralithodes camtschaticus
KEARFLAEEADRKYD

SEQ ID NO: 5683 - protein, 15 aa, Pandalus borealis
KEARFLAEEADRKYD

SEQ ID NO: 5684 - protein, 15 aa, Panulirus stimpsoni
KEARFLAEEADRKYD

SEQ ID NO: 5685 - protein, 15 aa, Penaeus aztecus
KEARFLAEEADRKYD

SEQ ID NO: 5686 - protein, 15 aa, Litopenaeus vannamei
KEARFLAEEADRKYD

SEQ ID NO: 5687 - protein, 15 aa, Melicertus latisulcatus
KEARFLAEEADRKYD

SEQ ID NO: 5688 - protein, 15 aa, Charybdis feriatus
KEARFLAEEADRKYD

SEQ ID NO: 5689 - protein, 15 aa, Portunus pelagicus
KEARFLAEEADRKYD

SEQ ID NO: 5690 - protein, 15 aa, Oratosquilla oratoria
KEARFLAEEADRKYD

SEQ ID NO: 5691 - protein, 15 aa, Metapenaeus ensis
KEARFLAEEADRKYD

SEQ ID NO: 5692 - protein, 15 aa, Penaeus monodon
KEARFLAEEADRKYD

SEQ ID NO: 5693 - protein, 15 aa, Eriocheir sinensis
KEARFLAEEADRKYD

SEQ ID NO: 5694 - protein, 15 aa, Homarus americanus
KEARFLAEEADRKYD

SEQ ID NO: 5695 - protein, 15 aa, Chironomus kiiensis
KEARFLAEEADKKYD

SEQ ID NO: 5696 - protein, 15 aa, Lepidoglyphus destructor
MQAMKLEKDNAIDRA

SEQ ID NO: 5697 - protein, 15 aa, Dermatophagoides farinae
MQAMKLEKDNAIDRA

SEQ ID NO: 5698 - protein, 15 aa, Chortoglyphus arcuatus
MQAMKLEKDNAIDRA

SEQ ID NO: 5699 - protein, 15 aa, Dermatophagoides pteronyssinus
MQAMKLEKDNAIDRA

SEQ ID NO: 5700 - protein, 15 aa, Blomia tropicalis
MQAMKLEKDNAIDRA

SEQ ID NO: 5701 - protein, 15 aa, Anisakis simplex
EAQMLAEEADRKYDE

SEQ ID NO: 5702 - protein, 15 aa, Ascaris lumbricoides
EAQMLAEEADRKYDE

SEQ ID NO: 5703 - protein, 15 aa, Metapenaeus ensis
KLEKDNAMDRADTLE

SEQ ID NO: 5704 - protein, 15 aa, Panulirus stimpsoni
KLEKDNAMDRADTLE

SEQ ID NO: 5705 - protein, 15 aa, Tresus keenae
QAMKIEKENALDKAE

SEQ ID NO: 5706 - protein, 15 aa, Chironomus kiiensis
QAMKLEKDNALDRAL

SEQ ID NO: 5707 - protein, 15 aa, Aedes aegypti
QAMKLEKDNALDRAL

SEQ ID NO: 5708 - protein, 15 aa, Ascaris lumbricoides
KEAQMLAEEADRKYD

SEQ ID NO: 5709 - protein, 15 aa, Anisakis simplex
KEAQMLAEEADRKYD

SEQ ID NO: 5710 - protein, 15 aa, Portunus pelagicus
DELVNEKEKYKSTTD

SEQ ID NO: 5711 - protein, 15 aa, Euphausia pacifica
EARLLAEEADRKYDE

SEQ ID NO: 5712 - protein, 15 aa, Euphausia superba
EARLLAEEADRKYDE

SEQ ID NO: 5713 - protein, 15 aa, Ascaris lumbricoides
MQAMKIEKDNALDRA

SEQ ID NO: 5714 - protein, 15 aa, Onchocerca volvulus
MQAMKIEKDNALDRA

SEQ ID NO: 5715 - protein, 15 aa, Anisakis simplex
MQAMKIEKDNALDRA

SEQ ID NO: 5716 - protein, 15 aa, Penaeus japonicus
ARFLAEEADRKYDEV

SEQ ID NO: 5717 - protein, 15 aa, Chionoecetes opilio
ARFLAEEADRKYDEV

SEQ ID NO: 5718 - protein, 15 aa, Crangon crangon
ARFLAEEADRKYDEV

SEQ ID NO: 5719 - protein, 15 aa, Macrobrachium rosenbergii
ARFLAEEADRKYDEV

SEQ ID NO: 5720 - protein, 15 aa, Scylla serrata
ARFLAEEADRKYDEV

SEQ ID NO: 5721 - protein, 15 aa, Procambarus clarkii
ARFLAEEADRKYDEV

SEQ ID NO: 5722 - protein, 15 aa, Portunus sanguinolentus
ARFLAEEADRKYDEV

SEQ ID NO: 5723 - protein, 15 aa, Portunus trituberculatus
ARFLAEEADRKYDEV

SEQ ID NO: 5724 - protein, 15 aa, Panulirus stimpsoni
ARFLAEEADRKYDEV

SEQ ID NO: 5725 - protein, 15 aa, Pandalus borealis
ARFLAEEADRKYDEV

SEQ ID NO: 5726 - protein, 15 aa, Paralithodes camtschaticus
ARFLAEEADRKYDEV

SEQ ID NO: 5727 - protein, 15 aa, Erimacrus isenbeckii
ARFLAEEADRKYDEV

SEQ ID NO: 5728 - protein, 15 aa, Penaeus aztecus
ARFLAEEADRKYDEV

SEQ ID NO: 5729 - protein, 15 aa, Litopenaeus vannamei
ARFLAEEADRKYDEV

SEQ ID NO: 5730 - protein, 15 aa, Charybdis feriatus
ARFLAEEADRKYDEV

SEQ ID NO: 5731 - protein, 15 aa, Melicertus latisulcatus
ARFLAEEADRKYDEV

SEQ ID NO: 5732 - protein, 15 aa, Homarus americanus
ARFLAEEADRKYDEV

SEQ ID NO: 5733 - protein, 15 aa, Eriocheir sinensis
ARFLAEEADRKYDEV

SEQ ID NO: 5734 - protein, 15 aa, Penaeus monodon
ARFLAEEADRKYDEV

SEQ ID NO: 5735 - protein, 15 aa, Portunus pelagicus
ARFLAEEADRKYDEV

SEQ ID NO: 5736 - protein, 15 aa, Metapenaeus ensis
ARFLAEEADRKYDEV

SEQ ID NO: 5737 - protein, 15 aa, Oratosquilla oratoria
ARFLAEEADRKYDEV

SEQ ID NO: 5738 - protein, 15 aa, Litopenaeus vannamei
EARFLAEEADRKYDE

SEQ ID NO: 5739 - protein, 15 aa, Penaeus aztecus
EARFLAEEADRKYDE

SEQ ID NO: 5740 - protein, 15 aa, Homarus americanus
EARFLAEEADRKYDE

SEQ ID NO: 5741 - protein, 15 aa, Eriocheir sinensis
EARFLAEEADRKYDE

SEQ ID NO: 5742 - protein, 15 aa, Penaeus monodon
EARFLAEEADRKYDE

SEQ ID NO: 5743 - protein, 15 aa, Portunus pelagicus
EARFLAEEADRKYDE

SEQ ID NO: 5744 - protein, 15 aa, Oratosquilla oratoria
EARFLAEEADRKYDE

SEQ ID NO: 5745 - protein, 15 aa, Metapenaeus ensis
EARFLAEEADRKYDE

SEQ ID NO: 5746 - protein, 15 aa, Charybdis feriatus
EARFLAEEADRKYDE

SEQ ID NO: 5747 - protein, 15 aa, Melicertus latisulcatus
EARFLAEEADRKYDE

SEQ ID NO: 5748 - protein, 15 aa, Crangon crangon
EARFLAEEADRKYDE

SEQ ID NO: 5749 - protein, 15 aa, Macrobrachium rosenbergii
EARFLAEEADRKYDE

SEQ ID NO: 5750 - protein, 15 aa, Scylla serrata
EARFLAEEADRKYDE

SEQ ID NO: 5751 - protein, 15 aa, Penaeus japonicus
EARFLAEEADRKYDE

SEQ ID NO: 5752 - protein, 15 aa, Chionoecetes opilio
EARFLAEEADRKYDE

SEQ ID NO: 5753 - protein, 15 aa, Panulirus stimpsoni
EARFLAEEADRKYDE

SEQ ID NO: 5754 - protein, 15 aa, Pandalus borealis
EARFLAEEADRKYDE

SEQ ID NO: 5755 - protein, 15 aa, Paralithodes camtschaticus
EARFLAEEADRKYDE

SEQ ID NO: 5756 - protein, 15 aa, Erimacrus isenbeckii
EARFLAEEADRKYDE

SEQ ID NO: 5757 - protein, 15 aa, Portunus sanguinolentus
EARFLAEEADRKYDE

SEQ ID NO: 5758 - protein, 15 aa, Procambarus clarkii
EARFLAEEADRKYDE

SEQ ID NO: 5759 - protein, 15 aa, Portunus trituberculatus
EARFLAEEADRKYDE

SEQ ID NO: 5760 - protein, 15 aa, Tresus keenae
MQAMKIEKENALDKA

SEQ ID NO: 5761 - protein, 15 aa, Sinonovacula constricta
MQAMKIEKENALDKS

SEQ ID NO: 5762 - protein, 15 aa, Pseudocardium sachalinense
MQAMKIEKENALDKS

SEQ ID NO: 5763 - protein, 15 aa, Blomia tropicalis
QAMKLEKDNAIDRAE

SEQ ID NO: 5764 - protein, 15 aa, Dermatophagoides pteronyssinus
QAMKLEKDNAIDRAE

SEQ ID NO: 5765 - protein, 15 aa, Chortoglyphus arcuatus
QAMKLEKDNAIDRAE

SEQ ID NO: 5766 - protein, 15 aa, Dermatophagoides farinae
QAMKLEKDNAIDRAE

SEQ ID NO: 5767 - protein, 15 aa, Lepidoglyphus destructor
QAMKLEKDNAIDRAE

SEQ ID NO: 5768 - protein, 15 aa, Aedes aegypti
MQAMKLEKDNALDRA

SEQ ID NO: 5769 - protein, 15 aa, Chironomus kiiensis
MQAMKLEKDNALDRA

SEQ ID NO: 5770 - protein, 15 aa, Onchocerca volvulus
AQLLAEEADRKYDEV

SEQ ID NO: 5771 - protein, 15 aa, Chironomus kiiensis
RFLAEEADKKYDEVA

SEQ ID NO: 5772 - protein, 15 aa, Chironomus kiiensis
EARFLAEEADKKYDE

SEQ ID NO: 5773 - protein, 15 aa, Periplaneta americana
MQAMKLEKDNAMDCA

SEQ ID NO: 5774 - protein, 15 aa, Penaeus monodon
MQAMKLEKDNAMDRA

SEQ ID NO: 5775 - protein, 15 aa, Oratosquilla oratoria
MQAMKLEKDNAMDRA

SEQ ID NO: 5776 - protein, 15 aa, Homarus americanus
MQAMKLEKDNAMDRA

SEQ ID NO: 5777 - protein, 15 aa, Eriocheir sinensis
MQAMKLEKDNAMDRA

SEQ ID NO: 5778 - protein, 15 aa, Periplaneta fuliginosa
MQAMKLEKDNAMDRA

SEQ ID NO: 5779 - protein, 15 aa, Melicertus latisulcatus
MQAMKLEKDNAMDRA

SEQ ID NO: 5780 - protein, 15 aa, Charybdis feriatus
MQAMKLEKDNAMDRA

SEQ ID NO: 5781 - protein, 15 aa, Litopenaeus vannamei
MQAMKLEKDNAMDRA

SEQ ID NO: 5782 - protein, 15 aa, Penaeus aztecus
MQAMKLEKDNAMDRA

SEQ ID NO: 5783 - protein, 15 aa, Erimacrus isenbeckii
MQAMKLEKDNAMDRA

SEQ ID NO: 5784 - protein, 15 aa, Blattella germanica
MQAMKLEKDNAMDRA

SEQ ID NO: 5785 - protein, 15 aa, Pandalus borealis
MQAMKLEKDNAMDRA

SEQ ID NO: 5786 - protein, 15 aa, Portunus trituberculatus
MQAMKLEKDNAMDRA

SEQ ID NO: 5787 - protein, 15 aa, Portunus sanguinolentus
MQAMKLEKDNAMDRA

SEQ ID NO: 5788 - protein, 15 aa, Scylla serrata
MQAMKLEKDNAMDRA

SEQ ID NO: 5789 - protein, 15 aa, Crangon crangon
MQAMKLEKDNAMDRA

SEQ ID NO: 5790 - protein, 15 aa, Macrobrachium rosenbergii
MQAMKLEKDNAMDRA

SEQ ID NO: 5791 - protein, 15 aa, Penaeus japonicus
MQAMKLEKDNAMDRA

SEQ ID NO: 5792 - protein, 15 aa, Euphausia pacifica
KEARLLAEEADRKYD

SEQ ID NO: 5793 - protein, 15 aa, Euphausia superba
KEARLLAEEADRKYD

SEQ ID NO: 5794 - protein, 15 aa, Anisakis simplex
QMLAEEADRKYDEVA

SEQ ID NO: 5795 - protein, 15 aa, Ascaris lumbricoides
QMLAEEADRKYDEVA

SEQ ID NO: 5796 - protein, 15 aa, Blattella germanica
QAMKLEKDNAMDRAL

SEQ ID NO: 5797 - protein, 15 aa, Periplaneta fuliginosa
QAMKLEKDNAMDRAL

SEQ ID NO: 5798 - protein, 15 aa, Onchocerca volvulus
EAQLLAEEADRKYDE

SEQ ID NO: 5799 - protein, 15 aa, Anisakis simplex
QAMKIEKDNALDRAD

SEQ ID NO: 5800 - protein, 15 aa, Ascaris lumbricoides
QAMKIEKDNALDRAD

SEQ ID NO: 5801 - protein, 15 aa, Onchocerca volvulus
QAMKIEKDNALDRAD

SEQ ID NO: 5802 - protein, 15 aa, Charybdis feriatus
RFLAEEADRKYDEVA

SEQ ID NO: 5803 - protein, 15 aa, Melicertus latisulcatus
RFLAEEADRKYDEVA

SEQ ID NO: 5804 - protein, 15 aa, Eriocheir sinensis
RFLAEEADRKYDEVA

SEQ ID NO: 5805 - protein, 15 aa, Homarus americanus
RFLAEEADRKYDEVA

SEQ ID NO: 5806 - protein, 15 aa, Portunus pelagicus
RFLAEEADRKYDEVA

SEQ ID NO: 5807 - protein, 15 aa, Oratosquilla oratoria
RFLAEEADRKYDEVA

SEQ ID NO: 5808 - protein, 15 aa, Metapenaeus ensis
RFLAEEADRKYDEVA

SEQ ID NO: 5809 - protein, 15 aa, Penaeus monodon
RFLAEEADRKYDEVA

SEQ ID NO: 5810 - protein, 15 aa, Penaeus aztecus
RFLAEEADRKYDEVA

SEQ ID NO: 5811 - protein, 15 aa, Litopenaeus vannamei
RFLAEEADRKYDEVA

SEQ ID NO: 5812 - protein, 15 aa, Procambarus clarkii
RFLAEEADRKYDEVA

SEQ ID NO: 5813 - protein, 15 aa, Portunus sanguinolentus
RFLAEEADRKYDEVA

SEQ ID NO: 5814 - protein, 15 aa, Portunus trituberculatus
RFLAEEADRKYDEVA

SEQ ID NO: 5815 - protein, 15 aa, Pandalus borealis
RFLAEEADRKYDEVA

SEQ ID NO: 5816 - protein, 15 aa, Panulirus stimpsoni
RFLAEEADRKYDEVA

SEQ ID NO: 5817 - protein, 15 aa, Erimacrus isenbeckii
RFLAEEADRKYDEVA

SEQ ID NO: 5818 - protein, 15 aa, Paralithodes camtschaticus
RFLAEEADRKYDEVA

SEQ ID NO: 5819 - protein, 15 aa, Penaeus japonicus
RFLAEEADRKYDEVA

SEQ ID NO: 5820 - protein, 15 aa, Chionoecetes opilio
RFLAEEADRKYDEVA

SEQ ID NO: 5821 - protein, 15 aa, Macrobrachium rosenbergii
RFLAEEADRKYDEVA

SEQ ID NO: 5822 - protein, 15 aa, Crangon crangon
RFLAEEADRKYDEVA

SEQ ID NO: 5823 - protein, 15 aa, Scylla serrata
RFLAEEADRKYDEVA

SEQ ID NO: 5824 - protein, 15 aa, Periplaneta fuliginosa
ARFMAEEADKKYDEV

SEQ ID NO: 5825 - protein, 15 aa, Blattella germanica
ARFMAEEADKKYDEV

SEQ ID NO: 5826 - protein, 15 aa, Periplaneta americana
ARFMAEEADKKYDEV

SEQ ID NO: 5827 - protein, 15 aa, Aedes aegypti
ARFMAEEADKKYDEV

SEQ ID NO: 5828 - protein, 15 aa, Aedes aegypti
RFMAEEADKKYDEVA

SEQ ID NO: 5829 - protein, 15 aa, Blattella germanica
RFMAEEADKKYDEVA

SEQ ID NO: 5830 - protein, 15 aa, Periplaneta americana
RFMAEEADKKYDEVA

SEQ ID NO: 5831 - protein, 15 aa, Periplaneta fuliginosa
RFMAEEADKKYDEVA

SEQ ID NO: 5832 - protein, 15 aa, Homarus americanus
QAMKLEKDNAMDRAD

SEQ ID NO: 5833 - protein, 15 aa, Eriocheir sinensis
QAMKLEKDNAMDRAD

SEQ ID NO: 5834 - protein, 15 aa, Penaeus monodon
QAMKLEKDNAMDRAD

SEQ ID NO: 5835 - protein, 15 aa, Oratosquilla oratoria
QAMKLEKDNAMDRAD

SEQ ID NO: 5836 - protein, 15 aa, Charybdis feriatus
QAMKLEKDNAMDRAD

SEQ ID NO: 5837 - protein, 15 aa, Melicertus latisulcatus
QAMKLEKDNAMDRAD

SEQ ID NO: 5838 - protein, 15 aa, Litopenaeus vannamei
QAMKLEKDNAMDRAD

SEQ ID NO: 5839 - protein, 15 aa, Penaeus aztecus
QAMKLEKDNAMDRAD

SEQ ID NO: 5840 - protein, 15 aa, Pandalus borealis
QAMKLEKDNAMDRAD

SEQ ID NO: 5841 - protein, 15 aa, Portunus sanguinolentus
QAMKLEKDNAMDRAD

SEQ ID NO: 5842 - protein, 15 aa, Crangon crangon
QAMKLEKDNAMDRAD

SEQ ID NO: 5843 - protein, 15 aa, Macrobrachium rosenbergii
QAMKLEKDNAMDRAD

SEQ ID NO: 5844 - protein, 15 aa, Scylla serrata
QAMKLEKDNAMDRAD

SEQ ID NO: 5845 - protein, 15 aa, Penaeus japonicus
QAMKLEKDNAMDRAD

SEQ ID NO: 5846 - protein, 15 aa, Periplaneta americana
QAMKLEKDNAMDCAL

SEQ ID NO: 5847 - protein, 15 aa, Ascaris lumbricoides
AQMLAEEADRKYDEV

SEQ ID NO: 5848 - protein, 15 aa, Anisakis simplex
AQMLAEEADRKYDEV

SEQ ID NO: 5849 - protein, 15 aa, Erimacrus isenbeckii
QAMKLEKDNAMDRAH

SEQ ID NO: 5850 - protein, 15 aa, Periplaneta fuliginosa
EARFMAEEADKKYDE

SEQ ID NO: 5851 - protein, 15 aa, Blattella germanica
EARFMAEEADKKYDE

SEQ ID NO: 5852 - protein, 15 aa, Periplaneta americana
EARFMAEEADKKYDE

SEQ ID NO: 5853 - protein, 15 aa, Aedes aegypti
EARFMAEEADKKYDE

SEQ ID NO: 5854 - protein, 15 aa, Chionoecetes opilio
LKEARFLAEEADRKY

SEQ ID NO: 5855 - protein, 15 aa, Penaeus japonicus
LKEARFLAEEADRKY

SEQ ID NO: 5856 - protein, 15 aa, Scylla serrata
LKEARFLAEEADRKY

SEQ ID NO: 5857 - protein, 15 aa, Macrobrachium rosenbergii
LKEARFLAEEADRKY

SEQ ID NO: 5858 - protein, 15 aa, Crangon crangon
LKEARFLAEEADRKY

SEQ ID NO: 5859 - protein, 15 aa, Portunus trituberculatus
LKEARFLAEEADRKY

SEQ ID NO: 5860 - protein, 15 aa, Procambarus clarkii
LKEARFLAEEADRKY

SEQ ID NO: 5861 - protein, 15 aa, Portunus sanguinolentus
LKEARFLAEEADRKY

SEQ ID NO: 5862 - protein, 15 aa, Erimacrus isenbeckii
LKEARFLAEEADRKY

SEQ ID NO: 5863 - protein, 15 aa, Paralithodes camtschaticus
LKEARFLAEEADRKY

SEQ ID NO: 5864 - protein, 15 aa, Panulirus stimpsoni
LKEARFLAEEADRKY

SEQ ID NO: 5865 - protein, 15 aa, Pandalus borealis
LKEARFLAEEADRKY

SEQ ID NO: 5866 - protein, 15 aa, Penaeus aztecus
LKEARFLAEEADRKY

SEQ ID NO: 5867 - protein, 15 aa, Litopenaeus vannamei
LKEARFLAEEADRKY

SEQ ID NO: 5868 - protein, 15 aa, Melicertus latisulcatus
LKEARFLAEEADRKY

SEQ ID NO: 5869 - protein, 15 aa, Charybdis feriatus
LKEARFLAEEADRKY

SEQ ID NO: 5870 - protein, 15 aa, Metapenaeus ensis
LKEARFLAEEADRKY

SEQ ID NO: 5871 - protein, 15 aa, Portunus pelagicus
LKEARFLAEEADRKY

SEQ ID NO: 5872 - protein, 15 aa, Oratosquilla oratoria
LKEARFLAEEADRKY

SEQ ID NO: 5873 - protein, 15 aa, Penaeus monodon
LKEARFLAEEADRKY

SEQ ID NO: 5874 - protein, 15 aa, Eriocheir sinensis
LKEARFLAEEADRKY

SEQ ID NO: 5875 - protein, 15 aa, Homarus americanus
LKEARFLAEEADRKY

SEQ ID NO: 5876 - protein, 15 aa, Blattella germanica
ELVHEKEKYKYICDD

SEQ ID NO: 5877 - protein, 15 aa, Tyrophagus putrescentiae
ELVHEKEKYESISDE

SEQ ID NO: 5878 - protein, 15 aa, Dermatophagoides pteronyssinus
ELVHEKEKYKSISDE

SEQ ID NO: 5879 - protein, 15 aa, Blomia tropicalis
ELVHEKEKYKSISDE

SEQ ID NO: 5880 - protein, 15 aa, Lepidoglyphus destructor
ELVHEKEKYKSISDE

SEQ ID NO: 5881 - protein, 15 aa, Dermatophagoides farinae
ELVHEKEKYKSISDE

SEQ ID NO: 5882 - protein, 15 aa, Chortoglyphus arcuatus
ELVHEKEKYKSISDE

SEQ ID NO: 5883 - protein, 15 aa, Euphausia pacifica
LKEARLLAEEADRKY

SEQ ID NO: 5884 - protein, 15 aa, Euphausia superba
LKEARLLAEEADRKY

SEQ ID NO: 5885 - protein, 15 aa, Periplaneta fuliginosa
LKEARFMAEEADKKY

SEQ ID NO: 5886 - protein, 15 aa, Aedes aegypti
LKEARFMAEEADKKY

SEQ ID NO: 5887 - protein, 15 aa, Blattella germanica
LKEARFMAEEADKKY

SEQ ID NO: 5888 - protein, 15 aa, Periplaneta americana
LKEARFMAEEADKKY

SEQ ID NO: 5889 - protein, 15 aa, Ascaris lumbricoides
ELVHEKERYKSISEE

SEQ ID NO: 5890 - protein, 15 aa, Anisakis simplex
ELVHEKERYKSISEE

SEQ ID NO: 5891 - protein, 15 aa, Ascaris lumbricoides
LKEAQMLAEEADRKY

SEQ ID NO: 5892 - protein, 15 aa, Anisakis simplex
LKEAQMLAEEADRKY

SEQ ID NO: 5893 - protein, 15 aa, Periplaneta americana
ELVHEKEKYKFICDD

SEQ ID NO: 5894 - protein, 15 aa, Periplaneta fuliginosa
ELVHEKEKYKFICDD

SEQ ID NO: 5895 - protein, 15 aa, Chironomus kiiensis
LKEARFLAEEADKKY

SEQ ID NO: 5896 - protein, 15 aa, Euphausia pacifica
DELVNEKEKYKGITD

SEQ ID NO: 5897 - protein, 15 aa, Euphausia superba
DELVNEKEKYKGITD

SEQ ID NO: 5898 - protein, 15 aa, Oratosquilla oratoria
ELVNEKEKYKSITDE

SEQ ID NO: 5899 - protein, 15 aa, Metapenaeus ensis
ELVNEKEKYKSITDE

SEQ ID NO: 5900 - protein, 15 aa, Penaeus monodon
ELVNEKEKYKSITDE

SEQ ID NO: 5901 - protein, 15 aa, Eriocheir sinensis
ELVNEKEKYKSITDE

SEQ ID NO: 5902 - protein, 15 aa, Homarus americanus
ELVNEKEKYKSITDE

SEQ ID NO: 5903 - protein, 15 aa, Melicertus latisulcatus
ELVNEKEKYKSITDE

SEQ ID NO: 5904 - protein, 15 aa, Litopenaeus vannamei
ELVNEKEKYKSITDE

SEQ ID NO: 5905 - protein, 15 aa, Penaeus aztecus
ELVNEKEKYKSITDE

SEQ ID NO: 5906 - protein, 15 aa, Erimacrus isenbeckii
ELVNEKEKYKSITDE

SEQ ID NO: 5907 - protein, 15 aa, Paralithodes camtschaticus
ELVNEKEKYKSITDE

SEQ ID NO: 5908 - protein, 15 aa, Panulirus stimpsoni
ELVNEKEKYKSITDE

SEQ ID NO: 5909 - protein, 15 aa, Pandalus borealis
ELVNEKEKYKSITDE

SEQ ID NO: 5910 - protein, 15 aa, Portunus trituberculatus
ELVNEKEKYKSITDE

SEQ ID NO: 5911 - protein, 15 aa, Procambarus clarkii
ELVNEKEKYKSITDE

SEQ ID NO: 5912 - protein, 15 aa, Portunus sanguinolentus
ELVNEKEKYKSITDE

SEQ ID NO: 5913 - protein, 15 aa, Scylla serrata
ELVNEKEKYKSITDE

SEQ ID NO: 5914 - protein, 15 aa, Macrobrachium rosenbergii
ELVNEKEKYKSITDE

SEQ ID NO: 5915 - protein, 15 aa, Crangon crangon
ELVNEKEKYKSITDE

SEQ ID NO: 5916 - protein, 15 aa, Penaeus japonicus
ELVNEKEKYKSITDE

SEQ ID NO: 5917 - protein, 15 aa, Melicertus latisulcatus
FLAEEADRKYDEVAR

SEQ ID NO: 5918 - protein, 15 aa, Charybdis feriatus
FLAEEADRKYDEVAR

SEQ ID NO: 5919 - protein, 15 aa, Oratosquilla oratoria
FLAEEADRKYDEVAR

SEQ ID NO: 5920 - protein, 15 aa, Portunus pelagicus
FLAEEADRKYDEVAR

SEQ ID NO: 5921 - protein, 15 aa, Metapenaeus ensis
FLAEEADRKYDEVAR

SEQ ID NO: 5922 - protein, 15 aa, Penaeus monodon
FLAEEADRKYDEVAR

SEQ ID NO: 5923 - protein, 15 aa, Eriocheir sinensis
FLAEEADRKYDEVAR

SEQ ID NO: 5924 - protein, 15 aa, Homarus americanus
FLAEEADRKYDEVAR

SEQ ID NO: 5925 - protein, 15 aa, Penaeus aztecus
FLAEEADRKYDEVAR

SEQ ID NO: 5926 - protein, 15 aa, Litopenaeus vannamei
FLAEEADRKYDEVAR

SEQ ID NO: 5927 - protein, 15 aa, Portunus trituberculatus
FLAEEADRKYDEVAR

SEQ ID NO: 5928 - protein, 15 aa, Portunus sanguinolentus
FLAEEADRKYDEVAR

SEQ ID NO: 5929 - protein, 15 aa, Procambarus clarkii
FLAEEADRKYDEVAR

SEQ ID NO: 5930 - protein, 15 aa, Erimacrus isenbeckii
FLAEEADRKYDEVAR

SEQ ID NO: 5931 - protein, 15 aa, Paralithodes camtschaticus
FLAEEADRKYDEVAR

SEQ ID NO: 5932 - protein, 15 aa, Pandalus borealis
FLAEEADRKYDEVAR

SEQ ID NO: 5933 - protein, 15 aa, Panulirus stimpsoni
FLAEEADRKYDEVAR

SEQ ID NO: 5934 - protein, 15 aa, Chionoecetes opilio
FLAEEADRKYDEVAR

SEQ ID NO: 5935 - protein, 15 aa, Penaeus japonicus
FLAEEADRKYDEVAR

SEQ ID NO: 5936 - protein, 15 aa, Scylla serrata
FLAEEADRKYDEVAR

SEQ ID NO: 5937 - protein, 15 aa, Macrobrachium rosenbergii
FLAEEADRKYDEVAR

SEQ ID NO: 5938 - protein, 15 aa, Crangon crangon
FLAEEADRKYDEVAR

SEQ ID NO: 5939 - protein, 15 aa, Penaeus japonicus
LAEEADRKYDEVARK

SEQ ID NO: 5940 - protein, 15 aa, Chionoecetes opilio
LAEEADRKYDEVARK

SEQ ID NO: 5941 - protein, 15 aa, Crangon crangon
LAEEADRKYDEVARK

SEQ ID NO: 5942 - protein, 15 aa, Macrobrachium rosenbergii
LAEEADRKYDEVARK

SEQ ID NO: 5943 - protein, 15 aa, Scylla serrata
LAEEADRKYDEVARK

SEQ ID NO: 5944 - protein, 15 aa, Portunus sanguinolentus
LAEEADRKYDEVARK

SEQ ID NO: 5945 - protein, 15 aa, Procambarus clarkii
LAEEADRKYDEVARK

SEQ ID NO: 5946 - protein, 15 aa, Portunus trituberculatus
LAEEADRKYDEVARK

SEQ ID NO: 5947 - protein, 15 aa, Panulirus stimpsoni
LAEEADRKYDEVARK

SEQ ID NO: 5948 - protein, 15 aa, Pandalus borealis
LAEEADRKYDEVARK

SEQ ID NO: 5949 - protein, 15 aa, Paralithodes camtschaticus
LAEEADRKYDEVARK

SEQ ID NO: 5950 - protein, 15 aa, Erimacrus isenbeckii
LAEEADRKYDEVARK

SEQ ID NO: 5951 - protein, 15 aa, Penaeus aztecus
LAEEADRKYDEVARK

SEQ ID NO: 5952 - protein, 15 aa, Litopenaeus vannamei
LAEEADRKYDEVARK

SEQ ID NO: 5953 - protein, 15 aa, Charybdis feriatus
LAEEADRKYDEVARK

SEQ ID NO: 5954 - protein, 15 aa, Melicertus latisulcatus
LAEEADRKYDEVARK

SEQ ID NO: 5955 - protein, 15 aa, Homarus americanus
LAEEADRKYDEVARK

SEQ ID NO: 5956 - protein, 15 aa, Eriocheir sinensis
LAEEADRKYDEVARK

SEQ ID NO: 5957 - protein, 15 aa, Penaeus monodon
LAEEADRKYDEVARK

SEQ ID NO: 5958 - protein, 15 aa, Portunus pelagicus
LAEEADRKYDEVARK

SEQ ID NO: 5959 - protein, 15 aa, Metapenaeus ensis
LAEEADRKYDEVARK

SEQ ID NO: 5960 - protein, 15 aa, Oratosquilla oratoria
LAEEADRKYDEVARK

SEQ ID NO: 5961 - protein, 15 aa, Chironomus kiiensis
LAEEADKKYDEVARK

SEQ ID NO: 5962 - protein, 15 aa, Periplaneta fuliginosa
FMAEEADKKYDEVAR

SEQ ID NO: 5963 - protein, 15 aa, Blattella germanica
FMAEEADKKYDEVAR

SEQ ID NO: 5964 - protein, 15 aa, Periplaneta americana
FMAEEADKKYDEVAR

SEQ ID NO: 5965 - protein, 15 aa, Aedes aegypti
FMAEEADKKYDEVAR

SEQ ID NO: 5966 - protein, 15 aa, Aedes aegypti
MAEEADKKYDEVARK

SEQ ID NO: 5967 - protein, 15 aa, Blattella germanica
MAEEADKKYDEVARK

SEQ ID NO: 5968 - protein, 15 aa, Periplaneta americana
MAEEADKKYDEVARK

SEQ ID NO: 5969 - protein, 15 aa, Periplaneta fuliginosa
MAEEADKKYDEVARK

SEQ ID NO: 5970 - protein, 15 aa, Chironomus kiiensis
FLAEEADKKYDEVAR

SEQ ID NO: 5971 - protein, 15 aa, Oratosquilla oratoria
YKEQIKQLTNKLKAA

SEQ ID NO: 5972 - protein, 15 aa, Euphausia pacifica
YKEQIKHLTHKLKTA

SEQ ID NO: 5973 - protein, 15 aa, Euphausia superba
YKEQIKHLTHKLKTA

SEQ ID NO: 5974 - protein, 15 aa, Oratosquilla oratoria
KEQIKQLTNKLKAAE

SEQ ID NO: 5975 - protein, 15 aa, Ascaris lumbricoides
AMKIEKDNALDRADA

SEQ ID NO: 5976 - protein, 15 aa, Onchocerca volvulus
AMKIEKDNALDRADA

SEQ ID NO: 5977 - protein, 15 aa, Anisakis simplex
AMKIEKDNALDRADA

SEQ ID NO: 5978 - protein, 15 aa, Lepisma saccharina
KRQIKTLTVKLKEAE

SEQ ID NO: 5979 - protein, 15 aa, Chironomus kiiensis
AMKLEKDNALDRALL

SEQ ID NO: 5980 - protein, 15 aa, Aedes aegypti
AMKLEKDNALDRALL

SEQ ID NO: 5981 - protein, 15 aa, Erimacrus isenbeckii
AMKLEKDNAMDRAHT

SEQ ID NO: 5982 - protein, 15 aa, Oratosquilla oratoria
EQIKQLTNKLKAAEA

SEQ ID NO: 5983 - protein, 15 aa, Litopenaeus vannamei
EQIKTLTNKLKAAEA

SEQ ID NO: 5984 - protein, 15 aa, Macrobrachium rosenbergii
EQIKTLTNKLKAAEA

SEQ ID NO: 5985 - protein, 15 aa, Crangon crangon
EQIKTLTNKLKAAEA

SEQ ID NO: 5986 - protein, 15 aa, Penaeus japonicus
EQIKTLTNKLKAAEA

SEQ ID NO: 5987 - protein, 15 aa, Penaeus aztecus
EQIKTLTNKLKAAEA

SEQ ID NO: 5988 - protein, 15 aa, Metapenaeus ensis
EQIKTLTNKLKAAEA

SEQ ID NO: 5989 - protein, 15 aa, Portunus pelagicus
EQIKTLTNKLKAAEA

SEQ ID NO: 5990 - protein, 15 aa, Penaeus monodon
EQIKTLTNKLKAAEA

SEQ ID NO: 5991 - protein, 15 aa, Panulirus stimpsoni
EQIKTLTNKLKAAEA

SEQ ID NO: 5992 - protein, 15 aa, Pandalus borealis
EQIKTLTNKLKAAEA

SEQ ID NO: 5993 - protein, 15 aa, Melicertus latisulcatus
EQIKTLTNKLKAAEA

SEQ ID NO: 5994 - protein, 15 aa, Litopenaeus vannamei
KEQIKTLTNKLKAAE

SEQ ID NO: 5995 - protein, 15 aa, Crangon crangon
KEQIKTLTNKLKAAE

SEQ ID NO: 5996 - protein, 15 aa, Macrobrachium rosenbergii
KEQIKTLTNKLKAAE

SEQ ID NO: 5997 - protein, 15 aa, Penaeus japonicus
KEQIKTLTNKLKAAE

SEQ ID NO: 5998 - protein, 15 aa, Penaeus aztecus
KEQIKTLTNKLKAAE

SEQ ID NO: 5999 - protein, 15 aa, Penaeus monodon
KEQIKTLTNKLKAAE

SEQ ID NO: 6000 - protein, 15 aa, Portunus pelagicus
KEQIKTLTNKLKAAE

SEQ ID NO: 6001 - protein, 15 aa, Metapenaeus ensis
KEQIKTLTNKLKAAE

SEQ ID NO: 6002 - protein, 15 aa, Pandalus borealis
KEQIKTLTNKLKAAE

SEQ ID NO: 6003 - protein, 15 aa, Panulirus stimpsoni
KEQIKTLTNKLKAAE

SEQ ID NO: 6004 - protein, 15 aa, Melicertus latisulcatus
KEQIKTLTNKLKAAE

SEQ ID NO: 6005 - protein, 15 aa, Penaeus aztecus
YKEQIKTLTNKLKAA

SEQ ID NO: 6006 - protein, 15 aa, Penaeus japonicus
YKEQIKTLTNKLKAA

SEQ ID NO: 6007 - protein, 15 aa, Crangon crangon
YKEQIKTLTNKLKAA

SEQ ID NO: 6008 - protein, 15 aa, Macrobrachium rosenbergii
YKEQIKTLTNKLKAA

SEQ ID NO: 6009 - protein, 15 aa, Litopenaeus vannamei
YKEQIKTLTNKLKAA

SEQ ID NO: 6010 - protein, 15 aa, Melicertus latisulcatus
YKEQIKTLTNKLKAA

SEQ ID NO: 6011 - protein, 15 aa, Panulirus stimpsoni
YKEQIKTLTNKLKAA

SEQ ID NO: 6012 - protein, 15 aa, Pandalus borealis
YKEQIKTLTNKLKAA

SEQ ID NO: 6013 - protein, 15 aa, Penaeus monodon
YKEQIKTLTNKLKAA

SEQ ID NO: 6014 - protein, 15 aa, Metapenaeus ensis
YKEQIKTLTNKLKAA

SEQ ID NO: 6015 - protein, 15 aa, Portunus pelagicus
YKEQIKTLTNKLKAA

SEQ ID NO: 6016 - protein, 15 aa, Blattella germanica
AMKLEKDNAMDRALL

SEQ ID NO: 6017 - protein, 15 aa, Periplaneta fuliginosa
AMKLEKDNAMDRALL

SEQ ID NO: 6018 - protein, 15 aa, Erimacrus isenbeckii
KEQIKTLANKLKAAE

SEQ ID NO: 6019 - protein, 15 aa, Scylla serrata
KEQIKTLANKLKAAE

SEQ ID NO: 6020 - protein, 15 aa, Eriocheir sinensis
KEQIKTLANKLKAAE

SEQ ID NO: 6021 - protein, 15 aa, Chionoecetes opilio
KEQIKTLANKLKAAE

SEQ ID NO: 6022 - protein, 15 aa, Portunus trituberculatus
KEQIKTLANKLKAAE

SEQ ID NO: 6023 - protein, 15 aa, Portunus sanguinolentus
KEQIKTLANKLKAAE

SEQ ID NO: 6024 - protein, 15 aa, Charybdis feriatus
KEQIKTLANKLKAAE

SEQ ID NO: 6025 - protein, 15 aa, Periplaneta americana
AMKLEKDNAMDCALL

SEQ ID NO: 6026 - protein, 15 aa, Homarus americanus
YKEQIKTLANKLKAA

SEQ ID NO: 6027 - protein, 15 aa, Paralithodes camtschaticus
YKEQIKTLANKLKAA

SEQ ID NO: 6028 - protein, 15 aa, Procambarus clarkii
YKEQIKTLANKLKAA

SEQ ID NO: 6029 - protein, 15 aa, Penaeus aztecus
AMKLEKDNAMDRADT

SEQ ID NO: 6030 - protein, 15 aa, Litopenaeus vannamei
AMKLEKDNAMDRADT

SEQ ID NO: 6031 - protein, 15 aa, Charybdis feriatus
AMKLEKDNAMDRADT

SEQ ID NO: 6032 - protein, 15 aa, Melicertus latisulcatus
AMKLEKDNAMDRADT

SEQ ID NO: 6033 - protein, 15 aa, Eriocheir sinensis
AMKLEKDNAMDRADT

SEQ ID NO: 6034 - protein, 15 aa, Homarus americanus
AMKLEKDNAMDRADT

SEQ ID NO: 6035 - protein, 15 aa, Oratosquilla oratoria
AMKLEKDNAMDRADT

SEQ ID NO: 6036 - protein, 15 aa, Penaeus monodon
AMKLEKDNAMDRADT

SEQ ID NO: 6037 - protein, 15 aa, Penaeus japonicus
AMKLEKDNAMDRADT

SEQ ID NO: 6038 - protein, 15 aa, Macrobrachium rosenbergii
AMKLEKDNAMDRADT

SEQ ID NO: 6039 - protein, 15 aa, Crangon crangon
AMKLEKDNAMDRADT

SEQ ID NO: 6040 - protein, 15 aa, Scylla serrata
AMKLEKDNAMDRADT

SEQ ID NO: 6041 - protein, 15 aa, Portunus sanguinolentus
AMKLEKDNAMDRADT

SEQ ID NO: 6042 - protein, 15 aa, Pandalus borealis
AMKLEKDNAMDRADT

SEQ ID NO: 6043 - protein, 15 aa, Litopenaeus vannamei
AYKEQIKTLTNKLKA

SEQ ID NO: 6044 - protein, 15 aa, Crangon crangon
AYKEQIKTLTNKLKA

SEQ ID NO: 6045 - protein, 15 aa, Macrobrachium rosenbergii
AYKEQIKTLTNKLKA

SEQ ID NO: 6046 - protein, 15 aa, Penaeus japonicus
AYKEQIKTLTNKLKA

SEQ ID NO: 6047 - protein, 15 aa, Penaeus aztecus
AYKEQIKTLTNKLKA

SEQ ID NO: 6048 - protein, 15 aa, Penaeus monodon
AYKEQIKTLTNKLKA

SEQ ID NO: 6049 - protein, 15 aa, Metapenaeus ensis
AYKEQIKTLTNKLKA

SEQ ID NO: 6050 - protein, 15 aa, Portunus pelagicus
AYKEQIKTLTNKLKA

SEQ ID NO: 6051 - protein, 15 aa, Pandalus borealis
AYKEQIKTLTNKLKA

SEQ ID NO: 6052 - protein, 15 aa, Panulirus stimpsoni
AYKEQIKTLTNKLKA

SEQ ID NO: 6053 - protein, 15 aa, Melicertus latisulcatus
AYKEQIKTLTNKLKA

SEQ ID NO: 6054 - protein, 15 aa, Homarus americanus
AYKEQIKTLANKLKA

SEQ ID NO: 6055 - protein, 15 aa, Paralithodes camtschaticus
AYKEQIKTLANKLKA

SEQ ID NO: 6056 - protein, 15 aa, Procambarus clarkii
AYKEQIKTLANKLKA

SEQ ID NO: 6057 - protein, 15 aa, Euphausia superba
AYKEQIKHLTHKLKT

SEQ ID NO: 6058 - protein, 15 aa, Euphausia pacifica
AYKEQIKHLTHKLKT

SEQ ID NO: 6059 - protein, 15 aa, Oratosquilla oratoria
AYKEQIKQLTNKLKA

SEQ ID NO: 6060 - protein, 15 aa, Eriocheir sinensis
TYKEQIKTLANKLKA

SEQ ID NO: 6061 - protein, 15 aa, Erimacrus isenbeckii
TYKEQIKTLANKLKA

SEQ ID NO: 6062 - protein, 15 aa, Scylla serrata
TYKEQIKTLANKLKA

SEQ ID NO: 6063 - protein, 15 aa, Portunus sanguinolentus
TYKEQIKTLANKLKA

SEQ ID NO: 6064 - protein, 15 aa, Charybdis feriatus
TYKEQIKTLANKLKA

SEQ ID NO: 6065 - protein, 15 aa, Chionoecetes opilio
TYKEQIKTLANKLKA

SEQ ID NO: 6066 - protein, 15 aa, Portunus trituberculatus
TYKEQIKTLANKLKA

SEQ ID NO: 6067 - protein, 15 aa, Paralithodes camtschaticus
KEQIKTLANKLKAAE

SEQ ID NO: 6068 - protein, 15 aa, Homarus americanus
KEQIKTLANKLKAAE

SEQ ID NO: 6069 - protein, 15 aa, Procambarus clarkii
KEQIKTLANKLKAAE

SEQ ID NO: 6070 - protein, 15 aa, Lepisma saccharina
RQIKTLTVKLKEAEA

SEQ ID NO: 6071 - protein, 15 aa, Portunus trituberculatus
EQIKTLANKLKAAEA

SEQ ID NO: 6072 - protein, 15 aa, Chionoecetes opilio
EQIKTLANKLKAAEA

SEQ ID NO: 6073 - protein, 15 aa, Charybdis feriatus
EQIKTLANKLKAAEA

SEQ ID NO: 6074 - protein, 15 aa, Procambarus clarkii
EQIKTLANKLKAAEA

SEQ ID NO: 6075 - protein, 15 aa, Portunus sanguinolentus
EQIKTLANKLKAAEA

SEQ ID NO: 6076 - protein, 15 aa, Scylla serrata
EQIKTLANKLKAAEA

SEQ ID NO: 6077 - protein, 15 aa, Erimacrus isenbeckii
EQIKTLANKLKAAEA

SEQ ID NO: 6078 - protein, 15 aa, Paralithodes camtschaticus
EQIKTLANKLKAAEA

SEQ ID NO: 6079 - protein, 15 aa, Eriocheir sinensis
EQIKTLANKLKAAEA

SEQ ID NO: 6080 - protein, 15 aa, Homarus americanus
EQIKTLANKLKAAEA

SEQ ID NO: 6081 - protein, 15 aa, Eriocheir sinensis
YKEQIKTLANKLKAA

SEQ ID NO: 6082 - protein, 15 aa, Scylla serrata
YKEQIKTLANKLKAA

SEQ ID NO: 6083 - protein, 15 aa, Erimacrus isenbeckii
YKEQIKTLANKLKAA

SEQ ID NO: 6084 - protein, 15 aa, Charybdis feriatus
YKEQIKTLANKLKAA

SEQ ID NO: 6085 - protein, 15 aa, Portunus sanguinolentus
YKEQIKTLANKLKAA

SEQ ID NO: 6086 - protein, 15 aa, Portunus trituberculatus
YKEQIKTLANKLKAA

SEQ ID NO: 6087 - protein, 15 aa, Chionoecetes opilio
YKEQIKTLANKLKAA

SEQ ID NO: 6088 - protein, 15 aa, Crassostrea virginica
LEDELLAEKERYKAI

SEQ ID NO: 6089 - protein, 15 aa, Scapharca broughtonii
LEDELLAEKERYKAI

SEQ ID NO: 6090 - protein, 15 aa, Octopus vulgaris
LEDELLAEKERYKAI

SEQ ID NO: 6091 - protein, 15 aa, Crassostrea gigas
LEDELLAEKERYKAI

SEQ ID NO: 6092 - protein, 15 aa, Mimachlamys nobilis
LEDELLAEKERYKAI

SEQ ID NO: 6093 - protein, 15 aa, Helix aspersa
LEDELLAEKERYKAT

SEQ ID NO: 6094 - protein, 15 aa, Neptunea polycostata
LEDELLAEKERYKNI

SEQ ID NO: 6095 - protein, 15 aa, Scapharca broughtonii
KYIAEDADRKYDEAA

SEQ ID NO: 6096 - protein, 15 aa, Euphausia pacifica
ENDLDQVSEALLKAN

SEQ ID NO: 6097 - protein, 15 aa, Euphausia superba
ENDLDQVSEALLKAN

SEQ ID NO: 6098 - protein, 15 aa, Procambarus clarkii
ENDLDQVQESLLKAN

SEQ ID NO: 6099 - protein, 15 aa, Turbo cornutus
KYIAEDAERKYDEAA

SEQ ID NO: 6100 - protein, 15 aa, Balanus rostratus
KYVAEEADRKYDEAA

SEQ ID NO: 6101 - protein, 15 aa, Venerupis philippinarum
KYVAEEADRKYDEAA

SEQ ID NO: 6102 - protein, 15 aa, Pseudocardium sachalinense
KYVAEEADRKYDEAA

SEQ ID NO: 6103 - protein, 15 aa, Tresus keenae
KYVAEEADRKYDEAA

SEQ ID NO: 6104 - protein, 15 aa, Solen strictus
KYVAEEADRKYDEAA

SEQ ID NO: 6105 - protein, 15 aa, Dermatophagoides farinae
IENELDQVQEQLSAA

SEQ ID NO: 6106 - protein, 15 aa, Dermatophagoides pteronyssinus
IENELDQVQEQLSAA

SEQ ID NO: 6107 - protein, 15 aa, Melicertus latisulcatus
LENDFDQVQEALLLA

SEQ ID NO: 6108 - protein, 15 aa, Portunus pelagicus
LENDLDQVQESLLKA

SEQ ID NO: 6109 - protein, 15 aa, Metapenaeus ensis
LENDLDQVQESLLKA

SEQ ID NO: 6110 - protein, 15 aa, Paralithodes camtschaticus
LENDLDQVQESLLKA

SEQ ID NO: 6111 - protein, 15 aa, Penaeus monodon
LENDLDQVQESLLKA

SEQ ID NO: 6112 - protein, 15 aa, Panulirus stimpsoni
LENDLDQVQESLLKA

SEQ ID NO: 6113 - protein, 15 aa, Homarus americanus
LENDLDQVQESLLKA

SEQ ID NO: 6114 - protein, 15 aa, Litopenaeus vannamei
LENDLDQVQESLLKA

SEQ ID NO: 6115 - protein, 15 aa, Penaeus aztecus
LENDLDQVQESLLKA

SEQ ID NO: 6116 - protein, 15 aa, Penaeus japonicus
LENDLDQVQESLLKA

SEQ ID NO: 6117 - protein, 15 aa, Oratosquilla oratoria
LENDLDQVQEQLLKA

SEQ ID NO: 6118 - protein, 15 aa, Crangon crangon
LENDLDSVQEALLKA

SEQ ID NO: 6119 - protein, 15 aa, Pandalus borealis
LENDLDSVQEALLKA

SEQ ID NO: 6120 - protein, 15 aa, Macrobrachium rosenbergii
LENDLDSVQEALLKA

SEQ ID NO: 6121 - protein, 15 aa, Melicertus latisulcatus
QLENDFDQVQEALLL

SEQ ID NO: 6122 - protein, 15 aa, Portunus pelagicus
QLENDLDQVQESLLK

SEQ ID NO: 6123 - protein, 15 aa, Metapenaeus ensis
QLENDLDQVQESLLK

SEQ ID NO: 6124 - protein, 15 aa, Penaeus monodon
QLENDLDQVQESLLK

SEQ ID NO: 6125 - protein, 15 aa, Paralithodes camtschaticus
QLENDLDQVQESLLK

SEQ ID NO: 6126 - protein, 15 aa, Panulirus stimpsoni
QLENDLDQVQESLLK

SEQ ID NO: 6127 - protein, 15 aa, Homarus americanus
QLENDLDQVQESLLK

SEQ ID NO: 6128 - protein, 15 aa, Penaeus aztecus
QLENDLDQVQESLLK

SEQ ID NO: 6129 - protein, 15 aa, Penaeus japonicus
QLENDLDQVQESLLK

SEQ ID NO: 6130 - protein, 15 aa, Litopenaeus vannamei
QLENDLDQVQESLLK

SEQ ID NO: 6131 - protein, 15 aa, Pandalus borealis
QLENDLDSVQEALLK

SEQ ID NO: 6132 - protein, 15 aa, Macrobrachium rosenbergii
QLENDLDSVQEALLK

SEQ ID NO: 6133 - protein, 15 aa, Crangon crangon
QLENDLDSVQEALLK

SEQ ID NO: 6134 - protein, 15 aa, Procambarus clarkii
HLENDLDQVQESLLK

SEQ ID NO: 6135 - protein, 15 aa, Chortoglyphus arcuatus
QIENELDQVQESFTQ

SEQ ID NO: 6136 - protein, 15 aa, Dermatophagoides farinae
QIENELDQVQEQLSA

SEQ ID NO: 6137 - protein, 15 aa, Dermatophagoides pteronyssinus
QIENELDQVQEQLSA

SEQ ID NO: 6138 - protein, 15 aa, Oratosquilla oratoria
QLENDLDQVQEQLLK

SEQ ID NO: 6139 - protein, 15 aa, Oratosquilla oratoria
ENDLDQVQEQLLKAN

SEQ ID NO: 6140 - protein, 15 aa, Scapharca broughtonii
AKYIAEDADRKYDEA

SEQ ID NO: 6141 - protein, 15 aa, Sepioteuthis lessoniana
KWIAEDADRKFDEAA

SEQ ID NO: 6142 - protein, 15 aa, Todarodes pacificus
KWIAEDADRKFDEAA

SEQ ID NO: 6143 - protein, 15 aa, Sepia esculenta
KWIAEDADRKFDEAA

SEQ ID NO: 6144 - protein, 15 aa, Octopus vulgaris
KWIAEDADRKFDEAA

SEQ ID NO: 6145 - protein, 15 aa, Ommastrephes bartramii
KWIAEDADRKFDEAA

SEQ ID NO: 6146 - protein, 15 aa, Haliotis diversicolor
AKYIAEDAERKYDEA

SEQ ID NO: 6147 - protein, 15 aa, Haliotis discus
AKYIAEDAERKYDEA

SEQ ID NO: 6148 - protein, 15 aa, Haliotis sp.
AKYIAEDAERKYDEA

SEQ ID NO: 6149 - protein, 15 aa, Helix aspersa
AKYIAEDAERKFDEA

SEQ ID NO: 6150 - protein, 15 aa, Panulirus stimpsoni
ENDLDQVQESLLKAN

SEQ ID NO: 6151 - protein, 15 aa, Homarus americanus
ENDLDQVQESLLKAN

SEQ ID NO: 6152 - protein, 15 aa, Metapenaeus ensis
ENDLDQVQESLLKAN

SEQ ID NO: 6153 - protein, 15 aa, Portunus pelagicus
ENDLDQVQESLLKAN

SEQ ID NO: 6154 - protein, 15 aa, Penaeus monodon
ENDLDQVQESLLKAN

SEQ ID NO: 6155 - protein, 15 aa, Paralithodes camtschaticus
ENDLDQVQESLLKAN

SEQ ID NO: 6156 - protein, 15 aa, Penaeus japonicus
ENDLDQVQESLLKAN

SEQ ID NO: 6157 - protein, 15 aa, Penaeus aztecus
ENDLDQVQESLLKAN

SEQ ID NO: 6158 - protein, 15 aa, Litopenaeus vannamei
ENDLDQVQESLLKAN

SEQ ID NO: 6159 - protein, 15 aa, Haliotis discus
KYIAEDAERKYDEAA

SEQ ID NO: 6160 - protein, 15 aa, Haliotis sp.
KYIAEDAERKYDEAA

SEQ ID NO: 6161 - protein, 15 aa, Neptunea polycostata
KYIAEDAERKYDEAA

SEQ ID NO: 6162 - protein, 15 aa, Haliotis diversicolor
KYIAEDAERKYDEAA

SEQ ID NO: 6163 - protein, 15 aa, Sepioteuthis lessoniana
AKWIAEDADRKFDEA

SEQ ID NO: 6164 - protein, 15 aa, Octopus vulgaris
AKWIAEDADRKFDEA

SEQ ID NO: 6165 - protein, 15 aa, Sepia esculenta
AKWIAEDADRKFDEA

SEQ ID NO: 6166 - protein, 15 aa, Todarodes pacificus
AKWIAEDADRKFDEA

SEQ ID NO: 6167 - protein, 15 aa, Ommastrephes bartramii
AKWIAEDADRKFDEA

SEQ ID NO: 6168 - protein, 15 aa, Neptunea polycostata
SKYIAEDAERKYDEA

SEQ ID NO: 6169 - protein, 15 aa, Helix aspersa
KYIAEDAERKFDEAA

SEQ ID NO: 6170 - protein, 15 aa, Pandalus borealis
ENDLDSVQEALLKAN

SEQ ID NO: 6171 - protein, 15 aa, Macrobrachium rosenbergii
ENDLDSVQEALLKAN

SEQ ID NO: 6172 - protein, 15 aa, Crangon crangon
ENDLDSVQEALLKAN

SEQ ID NO: 6173 - protein, 15 aa, Melicertus latisulcatus
ENDFDQVQEALLLAN

SEQ ID NO: 6174 - protein, 15 aa, Euphausia superba
NDLDQVSEALLKANT

SEQ ID NO: 6175 - protein, 15 aa, Euphausia pacifica
NDLDQVSEALLKANT

SEQ ID NO: 6176 - protein, 15 aa, Pandalus borealis
NDLDSVQEALLKANQ

SEQ ID NO: 6177 - protein, 15 aa, Macrobrachium rosenbergii
NDLDSVQEALLKANQ

SEQ ID NO: 6178 - protein, 15 aa, Crangon crangon
NDLDSVQEALLKANA

SEQ ID NO: 6179 - protein, 15 aa, Oratosquilla oratoria
NDLDQVQEQLLKANT

SEQ ID NO: 6180 - protein, 15 aa, Metapenaeus ensis
NDLDQVQESLLKANN

SEQ ID NO: 6181 - protein, 15 aa, Procambarus clarkii
NDLDQVQESLLKANT

SEQ ID NO: 6182 - protein, 15 aa, Panulirus stimpsoni
NDLDQVQESLLKANT

SEQ ID NO: 6183 - protein, 15 aa, Homarus americanus
NDLDQVQESLLKANT

SEQ ID NO: 6184 - protein, 15 aa, Portunus pelagicus
NDLDQVQESLLKANT

SEQ ID NO: 6185 - protein, 15 aa, Paralithodes camtschaticus
NDLDQVQESLLKANT

SEQ ID NO: 6186 - protein, 15 aa, Penaeus aztecus
NDLDQVQESLLKANI

SEQ ID NO: 6187 - protein, 15 aa, Penaeus japonicus
NDLDQVQESLLKANI

SEQ ID NO: 6188 - protein, 15 aa, Litopenaeus vannamei
NDLDQVQESLLKANI

SEQ ID NO: 6189 - protein, 15 aa, Penaeus monodon
NDLDQVQESLLKANI

SEQ ID NO: 6190 - protein, 15 aa, Metapenaeus ensis
DLDQVQESLLKANNQ

SEQ ID NO: 6191 - protein, 15 aa, Pandalus borealis
DLDSVQEALLKANQH

SEQ ID NO: 6192 - protein, 15 aa, Macrobrachium rosenbergii
DLDSVQEALLKANQH

SEQ ID NO: 6193 - protein, 15 aa, Paralithodes camtschaticus
DLDQVQESLLKANTQ

SEQ ID NO: 6194 - protein, 15 aa, Portunus pelagicus
DLDQVQESLLKANTQ

SEQ ID NO: 6195 - protein, 15 aa, Homarus americanus
DLDQVQESLLKANTQ

SEQ ID NO: 6196 - protein, 15 aa, Panulirus stimpsoni
DLDQVQESLLKANTQ

SEQ ID NO: 6197 - protein, 15 aa, Procambarus clarkii
DLDQVQESLLKANTQ

SEQ ID NO: 6198 - protein, 15 aa, Penaeus japonicus
DLDQVQESLLKANIQ

SEQ ID NO: 6199 - protein, 15 aa, Penaeus aztecus
DLDQVQESLLKANIQ

SEQ ID NO: 6200 - protein, 15 aa, Litopenaeus vannamei
DLDQVQESLLKANIQ

SEQ ID NO: 6201 - protein, 15 aa, Penaeus monodon
DLDQVQESLLKANIQ

SEQ ID NO: 6202 - protein, 15 aa, Oratosquilla oratoria
DLDQVQEQLLKANTQ

SEQ ID NO: 6203 - protein, 15 aa, Euphausia superba
DLDQVSEALLKANTQ

SEQ ID NO: 6204 - protein, 15 aa, Euphausia pacifica
DLDQVSEALLKANTQ

SEQ ID NO: 6205 - protein, 15 aa, Neptunea polycostata
LKESKYIAEDAERKY

SEQ ID NO: 6206 - protein, 15 aa, Euphausia superba
KEQIKHLTHKLKTAE

SEQ ID NO: 6207 - protein, 15 aa, Euphausia pacifica
KEQIKHLTHKLKTAE

SEQ ID NO: 6208 - protein, 15 aa, Euphausia pacifica
EQIKHLTHKLKTAEA

SEQ ID NO: 6209 - protein, 15 aa, Euphausia superba
EQIKHLTHKLKTAEA

SEQ ID NO: 6210 - protein, 15 aa, Ommastrephes bartramii
LEEAKWIAEDADRKF

SEQ ID NO: 6211 - protein, 15 aa, Sepioteuthis lessoniana
LEEAKWIAEDADRKF

SEQ ID NO: 6212 - protein, 15 aa, Sepia esculenta
LEEAKWIAEDADRKF

SEQ ID NO: 6213 - protein, 15 aa, Octopus vulgaris
LEEAKWIAEDADRKF

SEQ ID NO: 6214 - protein, 15 aa, Todarodes pacificus
LEEAKWIAEDADRKF

SEQ ID NO: 6215 - protein, 15 aa, Helix aspersa
LKEAKYIAEDAERKF

SEQ ID NO: 6216 - protein, 15 aa, Sepia esculenta
DELLAEKERYKSISD

SEQ ID NO: 6217 - protein, 15 aa, Todarodes pacificus
DELLAEKERYKSISD

SEQ ID NO: 6218 - protein, 15 aa, Helix aspersa
EDELLAEKERYKATS

SEQ ID NO: 6219 - protein, 15 aa, Turbo cornutus
LKEAKYIAEDAKYIA

SEQ ID NO: 6220 - protein, 15 aa, Haliotis discus
LKEAKYIAEDAERKY

SEQ ID NO: 6221 - protein, 15 aa, Haliotis sp.
LKEAKYIAEDAERKY

SEQ ID NO: 6222 - protein, 15 aa, Haliotis diversicolor
LKEAKYIAEDAERKY

SEQ ID NO: 6223 - protein, 15 aa, Scapharca broughtonii
LKEAKYIAEDADRKY

SEQ ID NO: 6224 - protein, 15 aa, Neptunea polycostata
EDELLAEKERYKNIS

SEQ ID NO: 6225 - protein, 15 aa, Salmo salar
LKEAKHIAEEADRKY

SEQ ID NO: 6226 - protein, 15 aa, Oreochromis mossambicus
LKEAKHIAEEADRKY

SEQ ID NO: 6227 - protein, 15 aa, Panulirus stimpsoni
QVQESLLKANTQLEE

SEQ ID NO: 6228 - protein, 15 aa, Homarus americanus
QVQESLLKANTQLEE

SEQ ID NO: 6229 - protein, 15 aa, Portunus pelagicus
QVQESLLKANTQLEE

SEQ ID NO: 6230 - protein, 15 aa, Procambarus clarkii
QVQESLLKANTQLEE

SEQ ID NO: 6231 - protein, 15 aa, Paralithodes camtschaticus
QVQESLLKANTQLED

SEQ ID NO: 6232 - protein, 15 aa, Oratosquilla oratoria
QVQEQLLKANTQLEE

SEQ ID NO: 6233 - protein, 15 aa, Euphausia superba
ALLKANTQLVEKDKA

SEQ ID NO: 6234 - protein, 15 aa, Euphausia pacifica
ALLKANTQLVEKDKA

SEQ ID NO: 6235 - protein, 15 aa, Paralithodes camtschaticus
VQESLLKANTQLEDK

SEQ ID NO: 6236 - protein, 15 aa, Litopenaeus vannamei
SLLKANIQLVEKDKA

SEQ ID NO: 6237 - protein, 15 aa, Penaeus monodon
SLLKANIQLVEKDKA

SEQ ID NO: 6238 - protein, 15 aa, Penaeus aztecus
SLLKANIQLVEKDKA

SEQ ID NO: 6239 - protein, 15 aa, Penaeus japonicus
SLLKANIQLVEKDKA

SEQ ID NO: 6240 - protein, 15 aa, Metapenaeus ensis
SLLKANNQLVEKDKA

SEQ ID NO: 6241 - protein, 15 aa, Helix aspersa
EAKYIAEDAERKFDE

SEQ ID NO: 6242 - protein, 15 aa, Lepisma saccharina
YKRQIKTLTVKLKEA

SEQ ID NO: 6243 - protein, 15 aa, Scapharca broughtonii
EAKYIAEDADRKYDE

SEQ ID NO: 6244 - protein, 15 aa, Haliotis discus
EAKYIAEDAERKYDE

SEQ ID NO: 6245 - protein, 15 aa, Haliotis sp.
EAKYIAEDAERKYDE

SEQ ID NO: 6246 - protein, 15 aa, Haliotis diversicolor
EAKYIAEDAERKYDE

SEQ ID NO: 6247 - protein, 15 aa, Euphausia superba
EALLKANTQLVEKDK

SEQ ID NO: 6248 - protein, 15 aa, Euphausia pacifica
EALLKANTQLVEKDK

SEQ ID NO: 6249 - protein, 15 aa, Neptunea polycostata
ESKYIAEDAERKYDE

SEQ ID NO: 6250 - protein, 15 aa, Oratosquilla oratoria
QLLKANTQLEEKDKA

SEQ ID NO: 6251 - protein, 15 aa, Onchocerca volvulus
ELVHEKERYKNISEE

SEQ ID NO: 6252 - protein, 15 aa, Homarus americanus
SLLKANTQLEEKDKA

SEQ ID NO: 6253 - protein, 15 aa, Panulirus stimpsoni
SLLKANTQLEEKDKA

SEQ ID NO: 6254 - protein, 15 aa, Portunus pelagicus
SLLKANTQLEEKDKA

SEQ ID NO: 6255 - protein, 15 aa, Procambarus clarkii
SLLKANTQLEEKDKA

SEQ ID NO: 6256 - protein, 15 aa, Crangon crangon
QIKTLTNKLKAAEAR

SEQ ID NO: 6257 - protein, 15 aa, Macrobrachium rosenbergii
QIKTLTNKLKAAEAR

SEQ ID NO: 6258 - protein, 15 aa, Litopenaeus vannamei
QIKTLTNKLKAAEAR

SEQ ID NO: 6259 - protein, 15 aa, Penaeus japonicus
QIKTLTNKLKAAEAR

SEQ ID NO: 6260 - protein, 15 aa, Penaeus aztecus
QIKTLTNKLKAAEAR

SEQ ID NO: 6261 - protein, 15 aa, Panulirus stimpsoni
QIKTLTNKLKAAEAR

SEQ ID NO: 6262 - protein, 15 aa, Pandalus borealis
QIKTLTNKLKAAEAR

SEQ ID NO: 6263 - protein, 15 aa, Penaeus monodon
QIKTLTNKLKAAEAR

SEQ ID NO: 6264 - protein, 15 aa, Metapenaeus ensis
QIKTLTNKLKAAEAR

SEQ ID NO: 6265 - protein, 15 aa, Portunus pelagicus
QIKTLTNKLKAAEAR

SEQ ID NO: 6266 - protein, 15 aa, Melicertus latisulcatus
QIKTLTNKLKAAEAR

SEQ ID NO: 6267 - protein, 15 aa, Penaeus japonicus
ESLLKANIQLVEKDK

SEQ ID NO: 6268 - protein, 15 aa, Penaeus aztecus
ESLLKANIQLVEKDK

SEQ ID NO: 6269 - protein, 15 aa, Litopenaeus vannamei
ESLLKANIQLVEKDK

SEQ ID NO: 6270 - protein, 15 aa, Penaeus monodon
ESLLKANIQLVEKDK

SEQ ID NO: 6271 - protein, 15 aa, Penaeus aztecus
QVQESLLKANIQLVE

SEQ ID NO: 6272 - protein, 15 aa, Penaeus japonicus
QVQESLLKANIQLVE

SEQ ID NO: 6273 - protein, 15 aa, Litopenaeus vannamei
QVQESLLKANIQLVE

SEQ ID NO: 6274 - protein, 15 aa, Penaeus monodon
QVQESLLKANIQLVE

SEQ ID NO: 6275 - protein, 15 aa, Crassostrea virginica
ELKVVGNNMKSLEIS

SEQ ID NO: 6276 - protein, 15 aa, Sepia esculenta
ELKVVGNNMKSLEIS

SEQ ID NO: 6277 - protein, 15 aa, Octopus vulgaris
ELKVVGNNMKSLEIS

SEQ ID NO: 6278 - protein, 15 aa, Helix aspersa
ELKVVGNNMKSLEIS

SEQ ID NO: 6279 - protein, 15 aa, Turbo cornutus
ELKVVGNNMKSLEIS

SEQ ID NO: 6280 - protein, 15 aa, Haliotis diversicolor
ELKVVGNNMKSLEIS

SEQ ID NO: 6281 - protein, 15 aa, Ommastrephes bartramii
ELKVVGNNMKSLEIS

SEQ ID NO: 6282 - protein, 15 aa, Todarodes pacificus
ELKVVGNNMKSLEIS

SEQ ID NO: 6283 - protein, 15 aa, Haliotis sp.
ELKVVGNNMKSLEIS

SEQ ID NO: 6284 - protein, 15 aa, Haliotis discus
ELKVVGNNMKSLEIS

SEQ ID NO: 6285 - protein, 15 aa, Sepioteuthis lessoniana
ELKVVGNNMKSLEIS

SEQ ID NO: 6286 - protein, 15 aa, Penaeus monodon
IKTLTNKLKAAEARA

SEQ ID NO: 6287 - protein, 15 aa, Metapenaeus ensis
IKTLTNKLKAAEARA

SEQ ID NO: 6288 - protein, 15 aa, Portunus pelagicus
IKTLTNKLKAAEARA

SEQ ID NO: 6289 - protein, 15 aa, Pandalus borealis
IKTLTNKLKAAEARA

SEQ ID NO: 6290 - protein, 15 aa, Panulirus stimpsoni
IKTLTNKLKAAEARA

SEQ ID NO: 6291 - protein, 15 aa, Melicertus latisulcatus
IKTLTNKLKAAEARA

SEQ ID NO: 6292 - protein, 15 aa, Litopenaeus vannamei
IKTLTNKLKAAEARA

SEQ ID NO: 6293 - protein, 15 aa, Crangon crangon
IKTLTNKLKAAEARA

SEQ ID NO: 6294 - protein, 15 aa, Macrobrachium rosenbergii
IKTLTNKLKAAEARA

SEQ ID NO: 6295 - protein, 15 aa, Penaeus japonicus
IKTLTNKLKAAEARA

SEQ ID NO: 6296 - protein, 15 aa, Penaeus aztecus
IKTLTNKLKAAEARA

SEQ ID NO: 6297 - protein, 15 aa, Metapenaeus ensis
QVQESLLKANNQLVE

SEQ ID NO: 6298 - protein, 15 aa, Procambarus clarkii
ESLLKANTQLEEKDK

SEQ ID NO: 6299 - protein, 15 aa, Portunus pelagicus
ESLLKANTQLEEKDK

SEQ ID NO: 6300 - protein, 15 aa, Homarus americanus
ESLLKANTQLEEKDK

SEQ ID NO: 6301 - protein, 15 aa, Panulirus stimpsoni
ESLLKANTQLEEKDK

SEQ ID NO: 6302 - protein, 15 aa, Litopenaeus vannamei
KTLTNKLKAAEARAE

SEQ ID NO: 6303 - protein, 15 aa, Crangon crangon
KTLTNKLKAAEARAE

SEQ ID NO: 6304 - protein, 15 aa, Macrobrachium rosenbergii
KTLTNKLKAAEARAE

SEQ ID NO: 6305 - protein, 15 aa, Penaeus japonicus
KTLTNKLKAAEARAE

SEQ ID NO: 6306 - protein, 15 aa, Penaeus aztecus
KTLTNKLKAAEARAE

SEQ ID NO: 6307 - protein, 15 aa, Penaeus monodon
KTLTNKLKAAEARAE

SEQ ID NO: 6308 - protein, 15 aa, Metapenaeus ensis
KTLTNKLKAAEARAE

SEQ ID NO: 6309 - protein, 15 aa, Portunus pelagicus
KTLTNKLKAAEARAE

SEQ ID NO: 6310 - protein, 15 aa, Panulirus stimpsoni
KTLTNKLKAAEARAE

SEQ ID NO: 6311 - protein, 15 aa, Pandalus borealis
KTLTNKLKAAEARAE

SEQ ID NO: 6312 - protein, 15 aa, Melicertus latisulcatus
KTLTNKLKAAEARAE

SEQ ID NO: 6313 - protein, 15 aa, Metapenaeus ensis
ESLLKANNQLVEKDK

SEQ ID NO: 6314 - protein, 15 aa, Portunus trituberculatus
IKTLANKLKAAEARA

SEQ ID NO: 6315 - protein, 15 aa, Chionoecetes opilio
IKTLANKLKAAEARA

SEQ ID NO: 6316 - protein, 15 aa, Charybdis feriatus
IKTLANKLKAAEARA

SEQ ID NO: 6317 - protein, 15 aa, Procambarus clarkii
IKTLANKLKAAEARA

SEQ ID NO: 6318 - protein, 15 aa, Portunus sanguinolentus
IKTLANKLKAAEARA

SEQ ID NO: 6319 - protein, 15 aa, Erimacrus isenbeckii
IKTLANKLKAAEARA

SEQ ID NO: 6320 - protein, 15 aa, Scylla serrata
IKTLANKLKAAEARA

SEQ ID NO: 6321 - protein, 15 aa, Paralithodes camtschaticus
IKTLANKLKAAEARA

SEQ ID NO: 6322 - protein, 15 aa, Eriocheir sinensis
IKTLANKLKAAEARA

SEQ ID NO: 6323 - protein, 15 aa, Homarus americanus
IKTLANKLKAAEARA

SEQ ID NO: 6324 - protein, 15 aa, Eriocheir sinensis
QIKTLANKLKAAEAR

SEQ ID NO: 6325 - protein, 15 aa, Homarus americanus
QIKTLANKLKAAEAR

SEQ ID NO: 6326 - protein, 15 aa, Erimacrus isenbeckii
QIKTLANKLKAAEAR

SEQ ID NO: 6327 - protein, 15 aa, Scylla serrata
QIKTLANKLKAAEAR

SEQ ID NO: 6328 - protein, 15 aa, Paralithodes camtschaticus
QIKTLANKLKAAEAR

SEQ ID NO: 6329 - protein, 15 aa, Charybdis feriatus
QIKTLANKLKAAEAR

SEQ ID NO: 6330 - protein, 15 aa, Procambarus clarkii
QIKTLANKLKAAEAR

SEQ ID NO: 6331 - protein, 15 aa, Portunus sanguinolentus
QIKTLANKLKAAEAR

SEQ ID NO: 6332 - protein, 15 aa, Portunus trituberculatus
QIKTLANKLKAAEAR

SEQ ID NO: 6333 - protein, 15 aa, Chionoecetes opilio
QIKTLANKLKAAEAR

SEQ ID NO: 6334 - protein, 15 aa, Homarus americanus
VQESLLKANTQLEEK

SEQ ID NO: 6335 - protein, 15 aa, Panulirus stimpsoni
VQESLLKANTQLEEK

SEQ ID NO: 6336 - protein, 15 aa, Portunus pelagicus
VQESLLKANTQLEEK

SEQ ID NO: 6337 - protein, 15 aa, Procambarus clarkii
VQESLLKANTQLEEK

SEQ ID NO: 6338 - protein, 15 aa, Metapenaeus ensis
VQESLLKANNQLVEK

SEQ ID NO: 6339 - protein, 15 aa, Litopenaeus vannamei
VQESLLKANIQLVEK

SEQ ID NO: 6340 - protein, 15 aa, Penaeus monodon
VQESLLKANIQLVEK

SEQ ID NO: 6341 - protein, 15 aa, Penaeus japonicus
VQESLLKANIQLVEK

SEQ ID NO: 6342 - protein, 15 aa, Penaeus aztecus
VQESLLKANIQLVEK

SEQ ID NO: 6343 - protein, 15 aa, Procambarus clarkii
KTLANKLKAAEARAE

SEQ ID NO: 6344 - protein, 15 aa, Portunus sanguinolentus
KTLANKLKAAEARAE

SEQ ID NO: 6345 - protein, 15 aa, Charybdis feriatus
KTLANKLKAAEARAE

SEQ ID NO: 6346 - protein, 15 aa, Chionoecetes opilio
KTLANKLKAAEARAE

SEQ ID NO: 6347 - protein, 15 aa, Portunus trituberculatus
KTLANKLKAAEARAE

SEQ ID NO: 6348 - protein, 15 aa, Homarus americanus
KTLANKLKAAEARAE

SEQ ID NO: 6349 - protein, 15 aa, Eriocheir sinensis
KTLANKLKAAEARAE

SEQ ID NO: 6350 - protein, 15 aa, Paralithodes camtschaticus
KTLANKLKAAEARAE

SEQ ID NO: 6351 - protein, 15 aa, Erimacrus isenbeckii
KTLANKLKAAEARAE

SEQ ID NO: 6352 - protein, 15 aa, Scylla serrata
KTLANKLKAAEARAE

SEQ ID NO: 6353 - protein, 15 aa, Periplaneta fuliginosa
MKLEKDNAMDRALLC

SEQ ID NO: 6354 - protein, 15 aa, Blattella germanica
MKLEKDNAMDRALLC

SEQ ID NO: 6355 - protein, 15 aa, Helix aspersa
KEAKYIAEDAERKFD

SEQ ID NO: 6356 - protein, 15 aa, Salmo salar
KEAKHIAEEADRKYE

SEQ ID NO: 6357 - protein, 15 aa, Oreochromis mossambicus
KEAKHIAEEADRKYE

SEQ ID NO: 6358 - protein, 15 aa, Neptunea polycostata
KESKYIAEDAERKYD

SEQ ID NO: 6359 - protein, 15 aa, Charybdis feriatus
KLEKDNAMDRADTLE

SEQ ID NO: 6360 - protein, 15 aa, Onchocerca volvulus
KIEKDNALDRADAAE

SEQ ID NO: 6361 - protein, 15 aa, Ascaris lumbricoides
KIEKDNALDRADAAE

SEQ ID NO: 6362 - protein, 15 aa, Anisakis simplex
KIEKDNALDRADAAE

SEQ ID NO: 6363 - protein, 15 aa, Penaeus aztecus
QESLLKANIQLVEKD

SEQ ID NO: 6364 - protein, 15 aa, Penaeus japonicus
QESLLKANIQLVEKD

SEQ ID NO: 6365 - protein, 15 aa, Litopenaeus vannamei
QESLLKANIQLVEKD

SEQ ID NO: 6366 - protein, 15 aa, Penaeus monodon
QESLLKANIQLVEKD

SEQ ID NO: 6367 - protein, 15 aa, Erimacrus isenbeckii
KLEKDNAMDRAHTLE

SEQ ID NO: 6368 - protein, 15 aa, Erimacrus isenbeckii
MKLEKDNAMDRAHTL

SEQ ID NO: 6369 - protein, 15 aa, Blattella germanica
KLEKDNAMDRALLCE

SEQ ID NO: 6370 - protein, 15 aa, Periplaneta fuliginosa
KLEKDNAMDRALLCE

SEQ ID NO: 6371 - protein, 15 aa, Charybdis feriatus
MKLEKDNAMDRADTL

SEQ ID NO: 6372 - protein, 15 aa, Metapenaeus ensis
QESLLKANNQLVEKD

SEQ ID NO: 6373 - protein, 15 aa, Aedes aegypti
KLEKDNALDRALLCE

SEQ ID NO: 6374 - protein, 15 aa, Chironomus kiiensis
KLEKDNALDRALLCE

SEQ ID NO: 6375 - protein, 15 aa, Scapharca broughtonii
KEAKYIAEDADRKYD

SEQ ID NO: 6376 - protein, 15 aa, Anisakis simplex
MKIEKDNALDRADAA

SEQ ID NO: 6377 - protein, 15 aa, Onchocerca volvulus
MKIEKDNALDRADAA

SEQ ID NO: 6378 - protein, 15 aa, Ascaris lumbricoides
MKIEKDNALDRADAA

SEQ ID NO: 6379 - protein, 15 aa, Haliotis diversicolor
KEAKYIAEDAERKYD

SEQ ID NO: 6380 - protein, 15 aa, Haliotis discus
KEAKYIAEDAERKYD

SEQ ID NO: 6381 - protein, 15 aa, Haliotis sp.
KEAKYIAEDAERKYD

SEQ ID NO: 6382 - protein, 15 aa, Portunus pelagicus
QESLLKANTQLEEKD

SEQ ID NO: 6383 - protein, 15 aa, Panulirus stimpsoni
QESLLKANTQLEEKD

SEQ ID NO: 6384 - protein, 15 aa, Homarus americanus
QESLLKANTQLEEKD

SEQ ID NO: 6385 - protein, 15 aa, Procambarus clarkii
QESLLKANTQLEEKD

SEQ ID NO: 6386 - protein, 15 aa, Chironomus kiiensis
MKLEKDNALDRALLC

SEQ ID NO: 6387 - protein, 15 aa, Aedes aegypti
MKLEKDNALDRALLC

SEQ ID NO: 6388 - protein, 15 aa, Fulvia mutica
KYVAEESDRKYDEAA

SEQ ID NO: 6389 - protein, 15 aa, Euphausia pacifica
QVSEALLKANTQLVE

SEQ ID NO: 6390 - protein, 15 aa, Euphausia superba
QVSEALLKANTQLVE

SEQ ID NO: 6391 - protein, 15 aa, Sinonovacula constricta
KYLAEEADRKYDEAA

SEQ ID NO: 6392 - protein, 15 aa, Fulvia mutica
KDAKYVAEESDRKYD

SEQ ID NO: 6393 - protein, 15 aa, Fulvia mutica
DAKYVAEESDRKYDE

SEQ ID NO: 6394 - protein, 15 aa, Sinonovacula constricta
SKYLAEEADRKYDEA

SEQ ID NO: 6395 - protein, 15 aa, Balanus rostratus
DAKYVAEEADRKYDE

SEQ ID NO: 6396 - protein, 15 aa, Solen strictus
DAKYVAEEADRKYDE

SEQ ID NO: 6397 - protein, 15 aa, Tresus keenae
DAKYVAEEADRKYDE

SEQ ID NO: 6398 - protein, 15 aa, Pseudocardium sachalinense
DAKYVAEEADRKYDE

SEQ ID NO: 6399 - protein, 15 aa, Venerupis philippinarum
DAKYVAEEADRKYDE

SEQ ID NO: 6400 - protein, 15 aa, Sinonovacula constricta
KDSKYLAEEADRKYD

SEQ ID NO: 6401 - protein, 15 aa, Venerupis philippinarum
VKDAKYVAEEADRKY

SEQ ID NO: 6402 - protein, 15 aa, Pseudocardium sachalinense
VKDAKYVAEEADRKY

SEQ ID NO: 6403 - protein, 15 aa, Tresus keenae
VKDAKYVAEEADRKY

SEQ ID NO: 6404 - protein, 15 aa, Solen strictus
VKDAKYVAEEADRKY

SEQ ID NO: 6405 - protein, 15 aa, Balanus rostratus
VKDAKYVAEEADRKY

SEQ ID NO: 6406 - protein, 15 aa, Balanus rostratus
AKYVAEEADRKYDEA

SEQ ID NO: 6407 - protein, 15 aa, Venerupis philippinarum
AKYVAEEADRKYDEA

SEQ ID NO: 6408 - protein, 15 aa, Pseudocardium sachalinense
AKYVAEEADRKYDEA

SEQ ID NO: 6409 - protein, 15 aa, Tresus keenae
AKYVAEEADRKYDEA

SEQ ID NO: 6410 - protein, 15 aa, Solen strictus
AKYVAEEADRKYDEA

SEQ ID NO: 6411 - protein, 15 aa, Fulvia mutica
VKDAKYVAEESDRKY

SEQ ID NO: 6412 - protein, 15 aa, Fulvia mutica
AKYVAEESDRKYDEA

SEQ ID NO: 6413 - protein, 15 aa, Balanus rostratus
KDAKYVAEEADRKYD

SEQ ID NO: 6414 - protein, 15 aa, Pseudocardium sachalinense
KDAKYVAEEADRKYD

SEQ ID NO: 6415 - protein, 15 aa, Venerupis philippinarum
KDAKYVAEEADRKYD

SEQ ID NO: 6416 - protein, 15 aa, Solen strictus
KDAKYVAEEADRKYD

SEQ ID NO: 6417 - protein, 15 aa, Tresus keenae
KDAKYVAEEADRKYD

SEQ ID NO: 6418 - protein, 15 aa, Sinonovacula constricta
DSKYLAEEADRKYDE

SEQ ID NO: 6419 - protein, 15 aa, Chortoglyphus arcuatus
QQIRIMTAKLKEAEA

SEQ ID NO: 6420 - protein, 15 aa, Dermatophagoides farinae
QQIRIMTAKLKEAEA

SEQ ID NO: 6421 - protein, 15 aa, Blomia tropicalis
QQIRMMTGKLKEAEA

SEQ ID NO: 6422 - protein, 15 aa, Blomia tropicalis
EQQIRMMTGKLKEAE

SEQ ID NO: 6423 - protein, 15 aa, Lepidoglyphus destructor
EQQIRIMTTKLKEAE

SEQ ID NO: 6424 - protein, 15 aa, Dermatophagoides pteronyssinus
EQQIRIMTTKLKEAE

SEQ ID NO: 6425 - protein, 15 aa, Chironomus kiiensis
DELVSEKEKYREIGD

SEQ ID NO: 6426 - protein, 15 aa, Tyrophagus putrescentiae
AYEQQIRIMTSKLKE

SEQ ID NO: 6427 - protein, 15 aa, Lepidoglyphus destructor
QQIRIMTTKLKEAEA

SEQ ID NO: 6428 - protein, 15 aa, Dermatophagoides pteronyssinus
QQIRIMTTKLKEAEA

SEQ ID NO: 6429 - protein, 15 aa, Tyrophagus putrescentiae
YEQQIRIMTSKLKEA

SEQ ID NO: 6430 - protein, 15 aa, Tyrophagus putrescentiae
EQQIRIMTSKLKEAE

SEQ ID NO: 6431 - protein, 15 aa, Dermatophagoides pteronyssinus
HEQQIRIMTTKLKEA

SEQ ID NO: 6432 - protein, 15 aa, Chortoglyphus arcuatus
EQQIRIMTAKLKEAE

SEQ ID NO: 6433 - protein, 15 aa, Dermatophagoides farinae
EQQIRIMTAKLKEAE

SEQ ID NO: 6434 - protein, 15 aa, Tyrophagus putrescentiae
QQIRIMTSKLKEAEA

SEQ ID NO: 6435 - protein, 15 aa, Dermatophagoides pteronyssinus
AHEQQIRIMTTKLKE

SEQ ID NO: 6436 - protein, 15 aa, Lepidoglyphus destructor
YEQQIRIMTTKLKEA

SEQ ID NO: 6437 - protein, 15 aa, Chortoglyphus arcuatus
YEQQIRIMTAKLKEA

SEQ ID NO: 6438 - protein, 15 aa, Dermatophagoides farinae
YEQQIRIMTAKLKEA

SEQ ID NO: 6439 - protein, 15 aa, Aedes aegypti
DELVMEKEKYREIGD

SEQ ID NO: 6440 - protein, 15 aa, Chironomus kiiensis
EDELVSEKEKYREIG

SEQ ID NO: 6441 - protein, 15 aa, Blomia tropicalis
YEQQIRMMTGKLKEA

SEQ ID NO: 6442 - protein, 15 aa, Dermatophagoides farinae
AYEQQIRIMTAKLKE

SEQ ID NO: 6443 - protein, 15 aa, Chortoglyphus arcuatus
AYEQQIRIMTAKLKE

SEQ ID NO: 6444 - protein, 15 aa, Lepidoglyphus destructor
AYEQQIRIMTTKLKE

SEQ ID NO: 6445 - protein, 15 aa, Aedes aegypti
EDELVMEKEKYREIG

SEQ ID NO: 6446 - protein, 15 aa, Blomia tropicalis
AYEQQIRMMTGKLKE

SEQ ID NO: 6447 - protein, 15 aa, Chironomus kiiensis
EYKNQIKTLTTRLKE

SEQ ID NO: 6448 - protein, 15 aa, Aedes aegypti
EYKNQIKTLTTRLKE

SEQ ID NO: 6449 - protein, 15 aa, Periplaneta americana
EYKQQIKTLTTRLKE

SEQ ID NO: 6450 - protein, 15 aa, Blattella germanica
EYKQQIKTLNTRLKE

SEQ ID NO: 6451 - protein, 15 aa, Aedes aegypti
NQIKTLTTRLKEAEA

SEQ ID NO: 6452 - protein, 15 aa, Chironomus kiiensis
NQIKTLTTRLKEAEA

SEQ ID NO: 6453 - protein, 15 aa, Blattella germanica
YKQQIKTLNTRLKEA

SEQ ID NO: 6454 - protein, 15 aa, Aedes aegypti
KNQIKTLTTRLKEAE

SEQ ID NO: 6455 - protein, 15 aa, Chironomus kiiensis
KNQIKTLTTRLKEAE

SEQ ID NO: 6456 - protein, 15 aa, Chironomus kiiensis
YKNQIKTLTTRLKEA

SEQ ID NO: 6457 - protein, 15 aa, Aedes aegypti
YKNQIKTLTTRLKEA

SEQ ID NO: 6458 - protein, 15 aa, Periplaneta americana
KQQIKTLTTRLKEAE

SEQ ID NO: 6459 - protein, 15 aa, Periplaneta fuliginosa
KQQIKTLTTRLKEAE

SEQ ID NO: 6460 - protein, 15 aa, Blattella germanica
QQIKTLNTRLKEAEA

SEQ ID NO: 6461 - protein, 15 aa, Periplaneta fuliginosa
AYKQQIKTLTTRLKE

SEQ ID NO: 6462 - protein, 15 aa, Periplaneta americana
QQIKTLTTRLKEAEA

SEQ ID NO: 6463 - protein, 15 aa, Periplaneta fuliginosa
QQIKTLTTRLKEAEA

SEQ ID NO: 6464 - protein, 15 aa, Periplaneta americana
YKQQIKTLTTRLKEA

SEQ ID NO: 6465 - protein, 15 aa, Blattella germanica
KQQIKTLNTRLKEAE

SEQ ID NO: 6466 - protein, 15 aa, Aedes aegypti
IKTLTTRLKEAEARA

SEQ ID NO: 6467 - protein, 15 aa, Periplaneta americana
IKTLTTRLKEAEARA

SEQ ID NO: 6468 - protein, 15 aa, Chironomus kiiensis
IKTLTTRLKEAEARA

SEQ ID NO: 6469 - protein, 15 aa, Periplaneta fuliginosa
IKTLTTRLKEAEARA

SEQ ID NO: 6470 - protein, 15 aa, Aedes aegypti
QIKTLTTRLKEAEAR

SEQ ID NO: 6471 - protein, 15 aa, Periplaneta americana
QIKTLTTRLKEAEAR

SEQ ID NO: 6472 - protein, 15 aa, Periplaneta fuliginosa
QIKTLTTRLKEAEAR

SEQ ID NO: 6473 - protein, 15 aa, Chironomus kiiensis
QIKTLTTRLKEAEAR

SEQ ID NO: 6474 - protein, 15 aa, Euphausia superba
VSEALLKANTQLVEK

SEQ ID NO: 6475 - protein, 15 aa, Euphausia pacifica
VSEALLKANTQLVEK

SEQ ID NO: 6476 - protein, 15 aa, Euphausia pacifica
QIKHLTHKLKTAEAR

SEQ ID NO: 6477 - protein, 15 aa, Euphausia superba
QIKHLTHKLKTAEAR

SEQ ID NO: 6478 - protein, 15 aa, Euphausia superba
SEALLKANTQLVEKD

SEQ ID NO: 6479 - protein, 15 aa, Euphausia pacifica
SEALLKANTQLVEKD

SEQ ID NO: 6480 - protein, 15 aa, Chortoglyphus arcuatus
QIRIMTAKLKEAEAR

SEQ ID NO: 6481 - protein, 15 aa, Dermatophagoides farinae
QIRIMTAKLKEAEAR

SEQ ID NO: 6482 - protein, 15 aa, Oreochromis mossambicus
AIKKKMQMLKLDKEN

SEQ ID NO: 6483 - protein, 15 aa, Salmo salar
AIKKKMQMLKLDKEN

SEQ ID NO: 6484 - protein, 15 aa, Oreochromis mossambicus
ELKTVTNNLKSLEAQ

SEQ ID NO: 6485 - protein, 15 aa, Salmo salar
ELKTVTNNLKSLEAQ

SEQ ID NO: 6486 - protein, 15 aa, Oreochromis mossambicus
EEELKTVTNNLKSLE

SEQ ID NO: 6487 - protein, 15 aa, Salmo salar
EEELKTVTNNLKSLE

SEQ ID NO: 6488 - protein, 15 aa, Dermatophagoides pteronyssinus
QIRIMTTKLKEAEAR

SEQ ID NO: 6489 - protein, 15 aa, Lepidoglyphus destructor
QIRIMTTKLKEAEAR

SEQ ID NO: 6490 - protein, 15 aa, Salmo salar
EELKTVTNNLKSLEA

SEQ ID NO: 6491 - protein, 15 aa, Oreochromis mossambicus
EELKTVTNNLKSLEA

SEQ ID NO: 6492 - protein, 15 aa, Chironomus kiiensis
ELVSEKEKYREIGDD

SEQ ID NO: 6493 - protein, 15 aa, Oreochromis mossambicus
DAIKKKMQMLKLDKE

SEQ ID NO: 6494 - protein, 15 aa, Salmo salar
DAIKKKMQMLKLDKE

SEQ ID NO: 6495 - protein, 15 aa, Salmo salar
ELEEELKTVTNNLKS

SEQ ID NO: 6496 - protein, 15 aa, Oreochromis mossambicus
ELEEELKTVTNNLKS

SEQ ID NO: 6497 - protein, 15 aa, Dermatophagoides pteronyssinus
RIMTTKLKEAEARAE

SEQ ID NO: 6498 - protein, 15 aa, Lepidoglyphus destructor
RIMTTKLKEAEARAE

SEQ ID NO: 6499 - protein, 15 aa, Dermatophagoides farinae
RIMTAKLKEAEARAE

SEQ ID NO: 6500 - protein, 15 aa, Chortoglyphus arcuatus
RIMTAKLKEAEARAE

SEQ ID NO: 6501 - protein, 15 aa, Aedes aegypti
ELVMEKEKYREIGDD

SEQ ID NO: 6502 - protein, 15 aa, Dermatophagoides pteronyssinus
IRIMTTKLKEAEARA

SEQ ID NO: 6503 - protein, 15 aa, Lepidoglyphus destructor
IRIMTTKLKEAEARA

SEQ ID NO: 6504 - protein, 15 aa, Chortoglyphus arcuatus
IRIMTAKLKEAEARA

SEQ ID NO: 6505 - protein, 15 aa, Dermatophagoides farinae
IRIMTAKLKEAEARA

SEQ ID NO: 6506 - protein, 15 aa, Oreochromis mossambicus
LEEELKTVTNNLKSL

SEQ ID NO: 6507 - protein, 15 aa, Salmo salar
LEEELKTVTNNLKSL

SEQ ID NO: 6508 - protein, 15 aa, Salmo salar
IKKKMQMLKLDKENA

SEQ ID NO: 6509 - protein, 15 aa, Oreochromis mossambicus
IKKKMQMLKLDKENA

SEQ ID NO: 6510 - protein, 15 aa, Crangon crangon
VQKLQKEVDRLEDEL

SEQ ID NO: 6511 - protein, 15 aa, Crangon crangon
EADRKYDEVARKLAM

SEQ ID NO: 6512 - protein, 15 aa, Crangon crangon
AEEADRKYDEVARKL

SEQ ID NO: 6513 - protein, 15 aa, Crangon crangon
LQKEVDRLEDELVNE

SEQ ID NO: 6514 - protein, 15 aa, Crangon crangon
SVQKLQKEVDRLEDE

SEQ ID NO: 6515 - protein, 15 aa, Crangon crangon
QKLQKEVDRLEDELV

SEQ ID NO: 6516 - protein, 15 aa, Crangon crangon
EVDRLEDELVNEKEK

SEQ ID NO: 6517 - protein, 15 aa, Crangon crangon
RSVQKLQKEVDRLED

SEQ ID NO: 6518 - protein, 15 aa, Crangon crangon
EEADRKYDEVARKLA

SEQ ID NO: 6519 - protein, 15 aa, Crangon crangon
KLQKEVDRLEDELVN

SEQ ID NO: 6520 - protein, 15 aa, Crangon crangon
EEAYKEQIKTLTNKL

SEQ ID NO: 6521 - protein, 15 aa, Crangon crangon
ADESERMRKVLENRS

SEQ ID NO: 6522 - protein, 15 aa, Crangon crangon
QKEVDRLEDELVNEK

SEQ ID NO: 6523 - protein, 15 aa, Crangon crangon
ADRKYDEVARKLAMV

SEQ ID NO: 6524 - protein, 15 aa, Crangon crangon
DRKYDEVARKLAMVE

SEQ ID NO: 6525 - protein, 15 aa, Crangon crangon
DELVNEKEKYKSITD

SEQ ID NO: 6526 - protein, 15 aa, Crangon crangon
LEDELVNEKEKYKSI

SEQ ID NO: 6527 - protein, 15 aa, Crangon crangon
VDRLEDELVNEKEKY

SEQ ID NO: 6528 - protein, 15 aa, Crangon crangon
KEVDRLEDELVNEKE

SEQ ID NO: 6529 - protein, 15 aa, Crangon crangon
DRLEDELVNEKEKYK

SEQ ID NO: 6530 - protein, 15 aa, Crangon crangon
ERSVQKLQKEVDRLE

SEQ ID NO: 6531 - protein, 15 aa, Crangon crangon
DAIKKKMQAMKLEKD

SEQ ID NO: 6532 - protein, 15 aa, Crangon crangon
EDELVNEKEKYKSIT

SEQ ID NO: 6533 - protein, 15 aa, Crangon crangon
RLEDELVNEKEKYKS

SEQ ID NO: 6534 - protein, 15 aa, Crangon crangon
DESERMRKVLENRSL

SEQ ID NO: 6535 - protein, 15 aa, Crangon crangon
LAEASQAADESERMR

SEQ ID NO: 6536 - protein, 15 aa, Crangon crangon
LEEDLERSEERLNTA

SEQ ID NO: 6537 - protein, 15 aa, Crangon crangon
LVNEKEKYKSITDEL

SEQ ID NO: 6538 - protein, 15 aa, Crangon crangon
QAADESERMRKVLEN

SEQ ID NO: 6539 - protein, 15 aa, Crangon crangon
AIKKKMQAMKLEKDN

SEQ ID NO: 6540 - protein, 15 aa, Crangon crangon
ASQAADESERMRKVL

SEQ ID NO: 6541 - protein, 15 aa, Crangon crangon
AETGESKIVELEEEL

SEQ ID NO: 6542 - protein, 15 aa, Crangon crangon
IKKKMQAMKLEKDNA

SEQ ID NO: 6543 - protein, 15 aa, Crangon crangon
SQAADESERMRKVLE

SEQ ID NO: 6544 - protein, 15 aa, Crangon crangon
EKEKYKSITDELDQT

SEQ ID NO: 6545 - protein, 15 aa, Crangon crangon
VELEEELRVVGNNLK

SEQ ID NO: 6546 - protein, 15 aa, Crangon crangon
AEASQAADESERMRK

SEQ ID NO: 6547 - protein, 15 aa, Crangon crangon
FAERSVQKLQKEVDR

SEQ ID NO: 6548 - protein, 15 aa, Crangon crangon
VAALNRRIQLLEEDL

SEQ ID NO: 6549 - protein, 15 aa, Crangon crangon
KEKYKSITDELDQTF

SEQ ID NO: 6550 - protein, 15 aa, Crangon crangon
QLLEEDLERSEERLN

SEQ ID NO: 6551 - protein, 15 aa, Crangon crangon
IVELEEELRVVGNNL

SEQ ID NO: 6552 - protein, 15 aa, Crangon crangon
KIVELEEELRVVGNN

SEQ ID NO: 6553 - protein, 15 aa, Crangon crangon
EFAERSVQKLQKEVD

SEQ ID NO: 6554 - protein, 15 aa, Crangon crangon
KSITDELDQTFSELS

SEQ ID NO: 6555 - protein, 15 aa, Crangon crangon
AERSVQKLQKEVDRL

SEQ ID NO: 6556 - protein, 15 aa, Crangon crangon
EKYKSITDELDQTFS

SEQ ID NO: 6557 - protein, 15 aa, Crangon crangon
YKSITDELDQTFSEL

SEQ ID NO: 6558 - protein, 15 aa, Crangon crangon
KYKSITDELDQTFSE

SEQ ID NO: 6559 - protein, 15 aa, Crangon crangon
LEEELRVVGNNLKSL

SEQ ID NO: 6560 - protein, 15 aa, Crangon crangon
AALNRRIQLLEEDLE

SEQ ID NO: 6561 - protein, 15 aa, Crangon crangon
ESERMRKVLENRSLS

SEQ ID NO: 6562 - protein, 15 aa, Crangon crangon
LNRRIQLLEEDLERS

SEQ ID NO: 6563 - protein, 15 aa, Crangon crangon
AADESERMRKVLENR

SEQ ID NO: 6564 - protein, 15 aa, Crangon crangon
ETGESKIVELEEELR

SEQ ID NO: 6565 - protein, 15 aa, Crangon crangon
EELRVVGNNLKSLEV

SEQ ID NO: 6566 - protein, 15 aa, Crangon crangon
KKKMQAMKLEKDNAM

SEQ ID NO: 6567 - protein, 15 aa, Crangon crangon
ALNRRIQLLEEDLER

SEQ ID NO: 6568 - protein, 15 aa, Crangon crangon
ESKIVELEEELRVVG

SEQ ID NO: 6569 - protein, 15 aa, Crangon crangon
LLEEDLERSEERLNT

SEQ ID NO: 6570 - protein, 15 aa, Crangon crangon
EEELRVVGNNLKSLE

SEQ ID NO: 6571 - protein, 15 aa, Crangon crangon
FLAEEADRKYDEVAR

SEQ ID NO: 6572 - protein, 15 aa, Crangon crangon
RIQLLEEDLERSEER

SEQ ID NO: 6573 - protein, 15 aa, Crangon crangon
SKIVELEEELRVVGN

SEQ ID NO: 6574 - protein, 15 aa, Crangon crangon
IQLLEEDLERSEERL

SEQ ID NO: 6575 - protein, 15 aa, Crangon crangon
LKEARFLAEEADRKY

SEQ ID NO: 6576 - protein, 15 aa, Crangon crangon
ELEEELRVVGNNLKS

SEQ ID NO: 6577 - protein, 15 aa, Crangon crangon
RVVGNNLKSLEVSEE

SEQ ID NO: 6578 - protein, 15 aa, Crangon crangon
KLAEASQAADESERM

SEQ ID NO: 6579 - protein, 15 aa, Crangon crangon
NEKEKYKSITDELDQ

SEQ ID NO: 6580 - protein, 15 aa, Crangon crangon
NRRIQLLEEDLERSE

SEQ ID NO: 6581 - protein, 15 aa, Crangon crangon
KLEKDNAMDRADTLE

SEQ ID NO: 6582 - protein, 15 aa, Crangon crangon
DLERSEERLNTATTK

SEQ ID NO: 6583 - protein, 15 aa, Crangon crangon
EGEVAALNRRIQLLE

SEQ ID NO: 6584 - protein, 15 aa, Crangon crangon
EDLERSEERLNTATT

SEQ ID NO: 6585 - protein, 15 aa, Crangon crangon
DEVARKLAMVEADLE

SEQ ID NO: 6586 - protein, 15 aa, Crangon crangon
VSEEKANQREEAYKE

SEQ ID NO: 6587 - protein, 15 aa, Crangon crangon
LERSEERLNTATTKL

SEQ ID NO: 6588 - protein, 15 aa, Crangon crangon
AEGEVAALNRRIQLL

SEQ ID NO: 6589 - protein, 15 aa, Crangon crangon
LERAEERAETGESKI

SEQ ID NO: 6590 - protein, 15 aa, Crangon crangon
SERMRKVLENRSLSD

SEQ ID NO: 6591 - protein, 15 aa, Crangon crangon
KKMQAMKLEKDNAMD

SEQ ID NO: 6592 - protein, 15 aa, Crangon crangon
DLERAEERAETGESK

SEQ ID NO: 6593 - protein, 15 aa, Crangon crangon
KMQAMKLEKDNAMDR

SEQ ID NO: 6594 - protein, 15 aa, Crangon crangon
LAEEADRKYDEVARK

SEQ ID NO: 6595 - protein, 15 aa, Crangon crangon
AMVEADLERAEERAE

SEQ ID NO: 6596 - protein, 11 aa, Crangon crangon
LDQTFSELSGY

SEQ ID NO: 6597 - protein, 15 aa, Crangon crangon
ERAEERAETGESKIV

SEQ ID NO: 6598 - protein, 15 aa, Crangon crangon
YDEVARKLAMVEADL

SEQ ID NO: 6599 - protein, 15 aa, Crangon crangon
AMKLEKDNAMDRADT

SEQ ID NO: 6600 - protein, 15 aa, Crangon crangon
EASQAADESERMRKV

SEQ ID NO: 6601 - protein, 15 aa, Crangon crangon
ERAETGESKIVELEE

SEQ ID NO: 6602 - protein, 15 aa, Crangon crangon
EVAALNRRIQLLEED

SEQ ID NO: 6603 - protein, 15 aa, Crangon crangon
TGESKIVELEEELRV

SEQ ID NO: 6604 - protein, 15 aa, Crangon crangon
QAMKLEKDNAMDRAD

SEQ ID NO: 6605 - protein, 15 aa, Crangon crangon
MQAMKLEKDNAMDRA

SEQ ID NO: 6606 - protein, 15 aa, Crangon crangon
RRIQLLEEDLERSEE

SEQ ID NO: 6607 - protein, 15 aa, Crangon crangon
MKLEKDNAMDRADTL

SEQ ID NO: 6608 - protein, 15 aa, Crangon crangon
RAEERAETGESKIVE

SEQ ID NO: 6609 - protein, 15 aa, Crangon crangon
LKSLEVSEEKANQRE

SEQ ID NO: 6610 - protein, 15 aa, Crangon crangon
RSEERLNTATTKLAE

SEQ ID NO: 6611 - protein, 15 aa, Crangon crangon
RADTLEQQNKEANNR

SEQ ID NO: 6612 - protein, 15 aa, Crangon crangon
KALSNAEGEVAALNR

SEQ ID NO: 6613 - protein, 15 aa, Crangon crangon
DEERMDALENQLKEA

SEQ ID NO: 6614 - protein, 15 aa, Crangon crangon
GESKIVELEEELRVV

SEQ ID NO: 6615 - protein, 15 aa, Crangon crangon
EERAETGESKIVELE

SEQ ID NO: 6616 - protein, 15 aa, Crangon crangon
QLKEARFLAEEADRK

SEQ ID NO: 6617 - protein, 15 aa, Crangon crangon
ERSEERLNTATTKLA

SEQ ID NO: 6618 - protein, 15 aa, Crangon crangon
LNTATTKLAEASQAA

SEQ ID NO: 6619 - protein, 15 aa, Crangon crangon
EEDLERSEERLNTAT

SEQ ID NO: 6620 - protein, 15 aa, Crangon crangon
MDALENQLKEARFLA

SEQ ID NO: 6621 - protein, 14 aa, Crangon crangon
TDELDQTFSELSGY

SEQ ID NO: 6622 - protein, 15 aa, Crangon crangon
RLNTATTKLAEASQA

SEQ ID NO: 6623 - protein, 15 aa, Crangon crangon
SNAEGEVAALNRRIQ

SEQ ID NO: 6624 - protein, 15 aa, Crangon crangon
SLEVSEEKANQREEA

SEQ ID NO: 6625 - protein, 15 aa, Crangon crangon
AEARAEFAERSVQKL

SEQ ID NO: 6626 - protein, 15 aa, Crangon crangon
VGNNLKSLEVSEEKA

SEQ ID NO: 6627 - protein, 15 aa, Crangon crangon
EARAEFAERSVQKLQ

SEQ ID NO: 6628 - protein, 15 aa, Crangon crangon
VVGNNLKSLEVSEEK

SEQ ID NO: 6629 - protein, 15 aa, Crangon crangon
TTKLAEASQAADESE

SEQ ID NO: 6630 - protein, 15 aa, Crangon crangon
LEVSEEKANQREEAY

SEQ ID NO: 6631 - protein, 15 aa, Crangon crangon
KSLEVSEEKANQREE

SEQ ID NO: 6632 - protein, 15 aa, Crangon crangon
LRVVGNNLKSLEVSE

SEQ ID NO: 6633 - protein, 15 aa, Crangon crangon
NLKSLEVSEEKANQR

SEQ ID NO: 6634 - protein, 15 aa, Crangon crangon
ARFLAEEADRKYDEV

SEQ ID NO: 6635 - protein, 15 aa, Crangon crangon
GNNLKSLEVSEEKAN

SEQ ID NO: 6636 - protein, 15 aa, Crangon crangon
AEFAERSVQKLQKEV

SEQ ID NO: 6637 - protein, 15 aa, Crangon crangon
ELRVVGNNLKSLEVS

SEQ ID NO: 6638 - protein, 15 aa, Crangon crangon
DKALSNAEGEVAALN

SEQ ID NO: 6639 - protein, 15 aa, Crangon crangon
NNLKSLEVSEEKANQ

SEQ ID NO: 6640 - protein, 15 aa, Crangon crangon
RAEFAERSVQKLQKE

SEQ ID NO: 6641 - protein, 15 aa, Crangon crangon
EKDNAMDRADTLEQQ

SEQ ID NO: 6642 - protein, 15 aa, Crangon crangon
EVSEEKANQREEAYK

SEQ ID NO: 6643 - protein, 15 aa, Crangon crangon
RKYDEVARKLAMVEA

SEQ ID NO: 6644 - protein, 15 aa, Crangon crangon
RKLAMVEADLERAEE

SEQ ID NO: 6645 - protein, 15 aa, Crangon crangon
KLAMVEADLERAEER

SEQ ID NO: 6646 - protein, 15 aa, Crangon crangon
KYDEVARKLAMVEAD

SEQ ID NO: 6647 - protein, 15 aa, Crangon crangon
KEARFLAEEADRKYD

SEQ ID NO: 6648 - protein, 15 aa, Crangon crangon
MVEADLERAEERAET

SEQ ID NO: 6649 - protein, 15 aa, Crangon crangon
REEAYKEQIKTLTNK

SEQ ID NO: 6650 - protein, 15 aa, Crangon crangon
EVARKLAMVEADLER

SEQ ID NO: 6651 - protein, 15 aa, Crangon crangon
VARKLAMVEADLERA

SEQ ID NO: 6652 - protein, 15 aa, Crangon crangon
EADLERAEERAETGE

SEQ ID NO: 6653 - protein, 15 aa, Crangon crangon
RAETGESKIVELEEE

SEQ ID NO: 6654 - protein, 15 aa, Crangon crangon
GEVAALNRRIQLLEE

SEQ ID NO: 6655 - protein, 15 aa, Crangon crangon
NAEGEVAALNRRIQL

SEQ ID NO: 6656 - protein, 15 aa, Crangon crangon
VEADLERAEERAETG

SEQ ID NO: 6657 - protein, 15 aa, Crangon crangon
ARKLAMVEADLERAE

SEQ ID NO: 6658 - protein, 15 aa, Crangon crangon
LAMVEADLERAEERA

SEQ ID NO: 6659 - protein, 15 aa, Crangon crangon
ADLERAEERAETGES

SEQ ID NO: 6660 - protein, 15 aa, Crangon crangon
EARFLAEEADRKYDE

SEQ ID NO: 6661 - protein, 15 aa, Crangon crangon
ARAEFAERSVQKLQK

SEQ ID NO: 6662 - protein, 15 aa, Crangon crangon
LSNAEGEVAALNRRI

SEQ ID NO: 6663 - protein, 15 aa, Crangon crangon
RMDALENQLKEARFL

SEQ ID NO: 6664 - protein, 15 aa, Crangon crangon
ERMDALENQLKEARF

SEQ ID NO: 6665 - protein, 15 aa, Crangon crangon
SEEKANQREEAYKEQ

SEQ ID NO: 6666 - protein, 15 aa, Crangon crangon
AEERAETGESKIVEL

SEQ ID NO: 6667 - protein, 15 aa, Crangon crangon
LENQLKEARFLAEEA

SEQ ID NO: 6668 - protein, 15 aa, Crangon crangon
KANQREEAYKEQIKT

SEQ ID NO: 6669 - protein, 15 aa, Crangon crangon
DALENQLKEARFLAE

SEQ ID NO: 6670 - protein, 15 aa, Crangon crangon
SDEERMDALENQLKE

SEQ ID NO: 6671 - protein, 15 aa, Crangon crangon
ALENQLKEARFLAEE

SEQ ID NO: 6672 - protein, 15 aa, Crangon crangon
EERMDALENQLKEAR

SEQ ID NO: 6673 - protein, 15 aa, Crangon crangon
ATTKLAEASQAADES

SEQ ID NO: 6674 - protein, 15 aa, Crangon crangon
ENRSLSDEERMDALE

SEQ ID NO: 6675 - protein, 15 aa, Crangon crangon
QQLENDLDSVQEALL

SEQ ID NO: 6676 - protein, 15 aa, Crangon crangon
VLENRSLSDEERMDA

SEQ ID NO: 6677 - protein, 15 aa, Crangon crangon
LENRSLSDEERMDAL

SEQ ID NO: 6678 - protein, 15 aa, Crangon crangon
TKLAEASQAADESER

SEQ ID NO: 6679 - protein, 15 aa, Crangon crangon
NTATTKLAEASQAAD

SEQ ID NO: 6680 - protein, 15 aa, Crangon crangon
ADTLEQQNKEANNRA

SEQ ID NO: 6681 - protein, 15 aa, Crangon crangon
ENQLKEARFLAEEAD

SEQ ID NO: 6682 - protein, 15 aa, Crangon crangon
ELVNEKEKYKSITDE

SEQ ID NO: 6683 - protein, 15 aa, Crangon crangon
RKVLENRSLSDEERM

SEQ ID NO: 6684 - protein, 15 aa, Crangon crangon
ERLNTATTKLAEASQ

SEQ ID NO: 6685 - protein, 15 aa, Crangon crangon
NQLKEARFLAEEADR

SEQ ID NO: 6686 - protein, 15 aa, Crangon crangon
NQREEAYKEQIKTLT

SEQ ID NO: 6687 - protein, 15 aa, Crangon crangon
RSLSDEERMDALENQ

SEQ ID NO: 6688 - protein, 15 aa, Crangon crangon
RFLAEEADRKYDEVA

SEQ ID NO: 6689 - protein, 15 aa, Crangon crangon
ALSNAEGEVAALNRR

SEQ ID NO: 6690 - protein, 15 aa, Crangon crangon
KVLENRSLSDEERMD

SEQ ID NO: 6691 - protein, 15 aa, Crangon crangon
LDSVQEALLKANAHL

SEQ ID NO: 6692 - protein, 15 aa, Crangon crangon
ITDELDQTFSELSGY

SEQ ID NO: 6693 - protein, 15 aa, Crangon crangon
KDKALSNAEGEVAAL

SEQ ID NO: 6694 - protein, 15 aa, Crangon crangon
NRSLSDEERMDALEN

SEQ ID NO: 6695 - protein, 15 aa, Crangon crangon
QREEAYKEQIKTLTN

SEQ ID NO: 6696 - protein, 15 aa, Crangon crangon
LEKDNAMDRADTLEQ

SEQ ID NO: 6697 - protein, 15 aa, Crangon crangon
EQIKTLTNKLKAAEA

SEQ ID NO: 6698 - protein, 15 aa, Crangon crangon
SITDELDQTFSELSG

SEQ ID NO: 6699 - protein, 15 aa, Crangon crangon
VNEKEKYKSITDELD

SEQ ID NO: 6700 - protein, 15 aa, Crangon crangon
ERMRKVLENRSLSDE

SEQ ID NO: 6701 - protein, 15 aa, Crangon crangon
AYKEQIKTLTNKLKA

SEQ ID NO: 6702 - protein, 15 aa, Crangon crangon
EEKANQREEAYKEQI

SEQ ID NO: 6703 - protein, 15 aa, Crangon crangon
EKANQREEAYKEQIK

SEQ ID NO: 6704 - protein, 15 aa, Crangon crangon
MRKVLENRSLSDEER

SEQ ID NO: 6705 - protein, 15 aa, Crangon crangon
EEKDKALSNAEGEVA

SEQ ID NO: 6706 - protein, 15 aa, Crangon crangon
ANQREEAYKEQIKTL

SEQ ID NO: 6707 - protein, 15 aa, Crangon crangon
LSDEERMDALENQLK

SEQ ID NO: 6708 - protein, 15 aa, Crangon crangon
KANAHLEEKDKALSN

SEQ ID NO: 6709 - protein, 15 aa, Crangon crangon
MDRADTLEQQNKEAN

SEQ ID NO: 6710 - protein, 15 aa, Crangon crangon
EERLNTATTKLAEAS

SEQ ID NO: 6711 - protein, 15 aa, Crangon crangon
EAYKEQIKTLTNKLK

SEQ ID NO: 6712 - protein, 15 aa, Crangon crangon
KEQIKTLTNKLKAAE

SEQ ID NO: 6713 - protein, 15 aa, Crangon crangon
SEERLNTATTKLAEA

SEQ ID NO: 6714 - protein, 15 aa, Crangon crangon
SLSDEERMDALENQL

SEQ ID NO: 6715 - protein, 15 aa, Crangon crangon
ANNRAEKSEEEVFSL

SEQ ID NO: 6716 - protein, 15 aa, Crangon crangon
EKDKALSNAEGEVAA

SEQ ID NO: 6717 - protein, 15 aa, Crangon crangon
NKLKAAEARAEFAER

SEQ ID NO: 6718 - protein, 15 aa, Crangon crangon
LQKRMQQLENDLDSV

SEQ ID NO: 6719 - protein, 15 aa, Crangon crangon
DNAMDRADTLEQQNK

SEQ ID NO: 6720 - protein, 15 aa, Crangon crangon
LENDLDSVQEALLKA

SEQ ID NO: 6721 - protein, 15 aa, Crangon crangon
TATTKLAEASQAADE

SEQ ID NO: 6722 - protein, 15 aa, Crangon crangon
QKRMQQLENDLDSVQ

SEQ ID NO: 6723 - protein, 15 aa, Crangon crangon
NAMDRADTLEQQNKE

SEQ ID NO: 6724 - protein, 15 aa, Crangon crangon
YKEQIKTLTNKLKAA

SEQ ID NO: 6725 - protein, 15 aa, Crangon crangon
KRMQQLENDLDSVQE

SEQ ID NO: 6726 - protein, 15 aa, Crangon crangon
AEKSEEEVFSLQKRM

SEQ ID NO: 6727 - protein, 15 aa, Crangon crangon
KLKAAEARAEFAERS

SEQ ID NO: 6728 - protein, 15 aa, Crangon crangon
NKEANNRAEKSEEEV

SEQ ID NO: 6729 - protein, 15 aa, Crangon crangon
VFSLQKRMQQLENDL

SEQ ID NO: 6730 - protein, 15 aa, Crangon crangon
AMDRADTLEQQNKEA

SEQ ID NO: 6731 - protein, 15 aa, Crangon crangon
RMRKVLENRSLSDEE

SEQ ID NO: 6732 - protein, 15 aa, Crangon crangon
KDNAMDRADTLEQQN

SEQ ID NO: 6733 - protein, 13 aa, Crangon crangon
DELDQTFSELSGY

SEQ ID NO: 6734 - protein, 15 aa, Crangon crangon
KEANNRAEKSEEEVF

SEQ ID NO: 6735 - protein, 15 aa, Crangon crangon
EEEVFSLQKRMQQLE

SEQ ID NO: 6736 - protein, 15 aa, Crangon crangon
NNRAEKSEEEVFSLQ

SEQ ID NO: 6737 - protein, 15 aa, Crangon crangon
DRADTLEQQNKEANN

SEQ ID NO: 6738 - protein, 15 aa, Crangon crangon
KSEEEVFSLQKRMQQ

SEQ ID NO: 6739 - protein, 15 aa, Crangon crangon
EQQNKEANNRAEKSE

SEQ ID NO: 6740 - protein, 15 aa, Crangon crangon
QNKEANNRAEKSEEE

SEQ ID NO: 6741 - protein, 15 aa, Crangon crangon
DTLEQQNKEANNRAE

SEQ ID NO: 6742 - protein, 15 aa, Crangon crangon
LEQQNKEANNRAEKS

SEQ ID NO: 6743 - protein, 15 aa, Crangon crangon
ANAHLEEKDKALSNA

SEQ ID NO: 6744 - protein, 15 aa, Crangon crangon
NDLDSVQEALLKANA

SEQ ID NO: 6745 - protein, 15 aa, Crangon crangon
TLEQQNKEANNRAEK

SEQ ID NO: 6746 - protein, 15 aa, Crangon crangon
QQNKEANNRAEKSEE

SEQ ID NO: 6747 - protein, 15 aa, Crangon crangon
QLENDLDSVQEALLK

SEQ ID NO: 6748 - protein, 15 aa, Crangon crangon
EANNRAEKSEEEVFS

SEQ ID NO: 6749 - protein, 15 aa, Crangon crangon
EVFSLQKRMQQLEND

SEQ ID NO: 6750 - protein, 15 aa, Crangon crangon
RAEKSEEEVFSLQKR

SEQ ID NO: 6751 - protein, 15 aa, Crangon crangon
EEVFSLQKRMQQLEN

SEQ ID NO: 6752 - protein, 15 aa, Crangon crangon
LKANAHLEEKDKALS

SEQ ID NO: 6753 - protein, 15 aa, Crangon crangon
MQQLENDLDSVQEAL

SEQ ID NO: 6754 - protein, 15 aa, Crangon crangon
ENDLDSVQEALLKAN

SEQ ID NO: 6755 - protein, 15 aa, Crangon crangon
FSLQKRMQQLENDLD

SEQ ID NO: 6756 - protein, 15 aa, Crangon crangon
AHLEEKDKALSNAEG

SEQ ID NO: 6757 - protein, 15 aa, Crangon crangon
DLDSVQEALLKANAH

SEQ ID NO: 6758 - protein, 15 aa, Crangon crangon
NAHLEEKDKALSNAE

SEQ ID NO: 6759 - protein, 15 aa, Crangon crangon
VQEALLKANAHLEEK

SEQ ID NO: 6760 - protein, 15 aa, Crangon crangon
RMQQLENDLDSVQEA

SEQ ID NO: 6761 - protein, 15 aa, Crangon crangon
NRAEKSEEEVFSLQK

SEQ ID NO: 6762 - protein, 15 aa, Crangon crangon
LEEKDKALSNAEGEV

SEQ ID NO: 6763 - protein, 15 aa, Crangon crangon
KTLTNKLKAAEARAE

SEQ ID NO: 6764 - protein, 15 aa, Crangon crangon
LTNKLKAAEARAEFA

SEQ ID NO: 6765 - protein, 15 aa, Crangon crangon
TNKLKAAEARAEFAE

SEQ ID NO: 6766 - protein, 15 aa, Crangon crangon
SEEEVFSLQKRMQQL

SEQ ID NO: 6767 - protein, 15 aa, Crangon crangon
EKSEEEVFSLQKRMQ

SEQ ID NO: 6768 - protein, 15 aa, Crangon crangon
SLQKRMQQLENDLDS

SEQ ID NO: 6769 - protein, 15 aa, Crangon crangon
EALLKANAHLEEKDK

SEQ ID NO: 6770 - protein, 15 aa, Crangon crangon
IKTLTNKLKAAEARA

SEQ ID NO: 6771 - protein, 15 aa, Crangon crangon
QEALLKANAHLEEKD

SEQ ID NO: 6772 - protein, 15 aa, Crangon crangon
QIKTLTNKLKAAEAR

SEQ ID NO: 6773 - protein, 15 aa, Crangon crangon
HLEEKDKALSNAEGE

SEQ ID NO: 6774 - protein, 15 aa, Crangon crangon
TLTNKLKAAEARAEF

SEQ ID NO: 6775 - protein, 15 aa, Crangon crangon
SVQEALLKANAHLEE

SEQ ID NO: 6776 - protein, 15 aa, Crangon crangon
DSVQEALLKANAHLE

SEQ ID NO: 6777 - protein, 15 aa, Crangon crangon
ALLKANAHLEEKDKA

SEQ ID NO: 6778 - protein, 15 aa, Litopenaeus vannamei
VQKLQKEVDRLEDEL

SEQ ID NO: 6779 - protein, 15 aa, Litopenaeus vannamei
EADRKYDEVARKLAM

SEQ ID NO: 6780 - protein, 15 aa, Litopenaeus vannamei
AEEADRKYDEVARKL

SEQ ID NO: 6781 - protein, 15 aa, Litopenaeus vannamei
LQKEVDRLEDELVNE

SEQ ID NO: 6782 - protein, 15 aa, Litopenaeus vannamei
SVQKLQKEVDRLEDE

SEQ ID NO: 6783 - protein, 15 aa, Litopenaeus vannamei
QKLQKEVDRLEDELV

SEQ ID NO: 6784 - protein, 15 aa, Litopenaeus vannamei
EVDRLEDELVNEKEK

SEQ ID NO: 6785 - protein, 15 aa, Litopenaeus vannamei
RSVQKLQKEVDRLED

SEQ ID NO: 6786 - protein, 15 aa, Litopenaeus vannamei
EEADRKYDEVARKLA

SEQ ID NO: 6787 - protein, 15 aa, Litopenaeus vannamei
KLQKEVDRLEDELVN

SEQ ID NO: 6788 - protein, 15 aa, Litopenaeus vannamei
EEAYKEQIKTLTNKL

SEQ ID NO: 6789 - protein, 15 aa, Litopenaeus vannamei
ADESERMRKVLENRS

SEQ ID NO: 6790 - protein, 15 aa, Litopenaeus vannamei
QKEVDRLEDELVNEK

SEQ ID NO: 6791 - protein, 15 aa, Litopenaeus vannamei
ADRKYDEVARKLAMV

SEQ ID NO: 6792 - protein, 15 aa, Litopenaeus vannamei
DRKYDEVARKLAMVE

SEQ ID NO: 6793 - protein, 15 aa, Litopenaeus vannamei
DELVNEKEKYKSITD

SEQ ID NO: 6794 - protein, 15 aa, Litopenaeus vannamei
LEDELVNEKEKYKSI

SEQ ID NO: 6795 - protein, 15 aa, Litopenaeus vannamei
VDRLEDELVNEKEKY

SEQ ID NO: 6796 - protein, 15 aa, Litopenaeus vannamei
KEVDRLEDELVNEKE

SEQ ID NO: 6797 - protein, 15 aa, Litopenaeus vannamei
DRLEDELVNEKEKYK

SEQ ID NO: 6798 - protein, 15 aa, Litopenaeus vannamei
ERSVQKLQKEVDRLE

SEQ ID NO: 6799 - protein, 15 aa, Litopenaeus vannamei
DAIKKKMQAMKLEKD

SEQ ID NO: 6800 - protein, 15 aa, Litopenaeus vannamei
EDELVNEKEKYKSIT

SEQ ID NO: 6801 - protein, 15 aa, Litopenaeus vannamei
RLEDELVNEKEKYKS

SEQ ID NO: 6802 - protein, 15 aa, Litopenaeus vannamei
DESERMRKVLENRSL

SEQ ID NO: 6803 - protein, 15 aa, Litopenaeus vannamei
LAEASQAADESERMR

SEQ ID NO: 6804 - protein, 15 aa, Litopenaeus vannamei
LEEDLERSEERLNTA

SEQ ID NO: 6805 - protein, 15 aa, Litopenaeus vannamei
LVNEKEKYKSITDEL

SEQ ID NO: 6806 - protein, 15 aa, Litopenaeus vannamei
QAADESERMRKVLEN

SEQ ID NO: 6807 - protein, 15 aa, Litopenaeus vannamei
AIKKKMQAMKLEKDN

SEQ ID NO: 6808 - protein, 15 aa, Litopenaeus vannamei
ASQAADESERMRKVL

SEQ ID NO: 6809 - protein, 15 aa, Litopenaeus vannamei
AETGESKIVELEEEL

SEQ ID NO: 6810 - protein, 15 aa, Litopenaeus vannamei
IKKKMQAMKLEKDNA

SEQ ID NO: 6811 - protein, 15 aa, Litopenaeus vannamei
SQAADESERMRKVLE

SEQ ID NO: 6812 - protein, 15 aa, Litopenaeus vannamei
EKEKYKSITDELDQT

SEQ ID NO: 6813 - protein, 15 aa, Litopenaeus vannamei
VELEEELRVVGNNLK

SEQ ID NO: 6814 - protein, 15 aa, Litopenaeus vannamei
YKSITDELDQTFELS

SEQ ID NO: 6815 - protein, 15 aa, Litopenaeus vannamei
AEASQAADESERMRK

SEQ ID NO: 6816 - protein, 15 aa, Litopenaeus vannamei
FAERSVQKLQKEVDR

SEQ ID NO: 6817 - protein, 15 aa, Litopenaeus vannamei
KSITDELDQTFELSG

SEQ ID NO: 6818 - protein, 15 aa, Litopenaeus vannamei
VAALNRRIQLLEEDL

SEQ ID NO: 6819 - protein, 15 aa, Litopenaeus vannamei
KEKYKSITDELDQTF

SEQ ID NO: 6820 - protein, 15 aa, Litopenaeus vannamei
QLLEEDLERSEERLN

SEQ ID NO: 6821 - protein, 15 aa, Litopenaeus vannamei
IVELEEELRVVGNNL

SEQ ID NO: 6822 - protein, 15 aa, Litopenaeus vannamei
KIVELEEELRVVGNN

SEQ ID NO: 6823 - protein, 15 aa, Litopenaeus vannamei
EFAERSVQKLQKEVD

SEQ ID NO: 6824 - protein, 15 aa, Litopenaeus vannamei
AERSVQKLQKEVDRL

SEQ ID NO: 6825 - protein, 15 aa, Litopenaeus vannamei
EKYKSITDELDQTFE

SEQ ID NO: 6826 - protein, 15 aa, Litopenaeus vannamei
KYKSITDELDQTFEL

SEQ ID NO: 6827 - protein, 15 aa, Litopenaeus vannamei
LEEELRVVGNNLKSL

SEQ ID NO: 6828 - protein, 15 aa, Litopenaeus vannamei
AALNRRIQLLEEDLE

SEQ ID NO: 6829 - protein, 15 aa, Litopenaeus vannamei
ESERMRKVLENRSLS

SEQ ID NO: 6830 - protein, 15 aa, Litopenaeus vannamei
LNRRIQLLEEDLERS

SEQ ID NO: 6831 - protein, 15 aa, Litopenaeus vannamei
AADESERMRKVLENR

SEQ ID NO: 6832 - protein, 15 aa, Litopenaeus vannamei
ETGESKIVELEEELR

SEQ ID NO: 6833 - protein, 15 aa, Litopenaeus vannamei
EELRVVGNNLKSLEV

SEQ ID NO: 6834 - protein, 15 aa, Litopenaeus vannamei
KKKMQAMKLEKDNAM

SEQ ID NO: 6835 - protein, 15 aa, Litopenaeus vannamei
ALNRRIQLLEEDLER

SEQ ID NO: 6836 - protein, 15 aa, Litopenaeus vannamei
ESKIVELEEELRVVG

SEQ ID NO: 6837 - protein, 15 aa, Litopenaeus vannamei
LLEEDLERSEERLNT

SEQ ID NO: 6838 - protein, 15 aa, Litopenaeus vannamei
EEELRVVGNNLKSLE

SEQ ID NO: 6839 - protein, 15 aa, Litopenaeus vannamei
FLAEEADRKYDEVAR

SEQ ID NO: 6840 - protein, 15 aa, Litopenaeus vannamei
RIQLLEEDLERSEER

SEQ ID NO: 6841 - protein, 15 aa, Litopenaeus vannamei
SKIVELEEELRVVGN

SEQ ID NO: 6842 - protein, 15 aa, Litopenaeus vannamei
IQLLEEDLERSEERL

SEQ ID NO: 6843 - protein, 15 aa, Litopenaeus vannamei
LKEARFLAEEADRKY

SEQ ID NO: 6844 - protein, 15 aa, Litopenaeus vannamei
ELEEELRVVGNNLKS

SEQ ID NO: 6845 - protein, 15 aa, Litopenaeus vannamei
RVVGNNLKSLEVSEE

SEQ ID NO: 6846 - protein, 15 aa, Litopenaeus vannamei
KLAEASQAADESERM

SEQ ID NO: 6847 - protein, 15 aa, Litopenaeus vannamei
NEKEKYKSITDELDQ

SEQ ID NO: 6848 - protein, 15 aa, Litopenaeus vannamei
NRRIQLLEEDLERSE

SEQ ID NO: 6849 - protein, 15 aa, Litopenaeus vannamei
KLEKDNAMDRADTLE

SEQ ID NO: 6850 - protein, 15 aa, Litopenaeus vannamei
DLERSEERLNTATTK

SEQ ID NO: 6851 - protein, 15 aa, Litopenaeus vannamei
EGEVAALNRRIQLLE

SEQ ID NO: 6852 - protein, 15 aa, Litopenaeus vannamei
EDLERSEERLNTATT

SEQ ID NO: 6853 - protein, 15 aa, Litopenaeus vannamei
DEVARKLAMVEADLE

SEQ ID NO: 6854 - protein, 15 aa, Litopenaeus vannamei
VSEEKANQREEAYKE

SEQ ID NO: 6855 - protein, 15 aa, Litopenaeus vannamei
LERSEERLNTATTKL

SEQ ID NO: 6856 - protein, 15 aa, Litopenaeus vannamei
AEGEVAALNRRIQLL

SEQ ID NO: 6857 - protein, 15 aa, Litopenaeus vannamei
LERAEERAETGESKI

SEQ ID NO: 6858 - protein, 15 aa, Litopenaeus vannamei
SERMRKVLENRSLSD

SEQ ID NO: 6859 - protein, 15 aa, Litopenaeus vannamei
KKMQAMKLEKDNAMD

SEQ ID NO: 6860 - protein, 15 aa, Litopenaeus vannamei
DLERAEERAETGESK

SEQ ID NO: 6861 - protein, 15 aa, Litopenaeus vannamei
KMQAMKLEKDNAMDR

SEQ ID NO: 6862 - protein, 15 aa, Litopenaeus vannamei
LAEEADRKYDEVARK

SEQ ID NO: 6863 - protein, 15 aa, Litopenaeus vannamei
AMVEADLERAEERAE

SEQ ID NO: 6864 - protein, 15 aa, Litopenaeus vannamei
ERAEERAETGESKIV

SEQ ID NO: 6865 - protein, 15 aa, Litopenaeus vannamei
YDEVARKLAMVEADL

SEQ ID NO: 6866 - protein, 15 aa, Litopenaeus vannamei
AMKLEKDNAMDRADT

SEQ ID NO: 6867 - protein, 10 aa, Litopenaeus vannamei
LDQTFELSGY

SEQ ID NO: 6868 - protein, 15 aa, Litopenaeus vannamei
EASQAADESERMRKV

SEQ ID NO: 6869 - protein, 15 aa, Litopenaeus vannamei
ERAETGESKIVELEE

SEQ ID NO: 6870 - protein, 15 aa, Litopenaeus vannamei
EVAALNRRIQLLEED

SEQ ID NO: 6871 - protein, 15 aa, Litopenaeus vannamei
TGESKIVELEEELRV

SEQ ID NO: 6872 - protein, 15 aa, Litopenaeus vannamei
QAMKLEKDNAMDRAD

SEQ ID NO: 6873 - protein, 15 aa, Litopenaeus vannamei
MQAMKLEKDNAMDRA

SEQ ID NO: 6874 - protein, 15 aa, Litopenaeus vannamei
RRIQLLEEDLERSEE

SEQ ID NO: 6875 - protein, 15 aa, Litopenaeus vannamei
MKLEKDNAMDRADTL

SEQ ID NO: 6876 - protein, 15 aa, Litopenaeus vannamei
RAEERAETGESKIVE

SEQ ID NO: 6877 - protein, 15 aa, Litopenaeus vannamei
GESKIVELEEELRVV

SEQ ID NO: 6878 - protein, 15 aa, Litopenaeus vannamei
LKSLEVSEEKANQRE

SEQ ID NO: 6879 - protein, 15 aa, Litopenaeus vannamei
RSEERLNTATTKLAE

SEQ ID NO: 6880 - protein, 15 aa, Litopenaeus vannamei
RADTLEQQNKEANNR

SEQ ID NO: 6881 - protein, 15 aa, Litopenaeus vannamei
KALSNAEGEVAALNR

SEQ ID NO: 6882 - protein, 15 aa, Litopenaeus vannamei
DEERMDALENQLKEA

SEQ ID NO: 6883 - protein, 15 aa, Litopenaeus vannamei
EERAETGESKIVELE

SEQ ID NO: 6884 - protein, 15 aa, Litopenaeus vannamei
QLKEARFLAEEADRK

SEQ ID NO: 6885 - protein, 15 aa, Litopenaeus vannamei
ERSEERLNTATTKLA

SEQ ID NO: 6886 - protein, 13 aa, Litopenaeus vannamei
TDELDQTFELSGY

SEQ ID NO: 6887 - protein, 15 aa, Litopenaeus vannamei
LNTATTKLAEASQAA

SEQ ID NO: 6888 - protein, 15 aa, Litopenaeus vannamei
EEDLERSEERLNTAT

SEQ ID NO: 6889 - protein, 15 aa, Litopenaeus vannamei
MDALENQLKEARFLA

SEQ ID NO: 6890 - protein, 15 aa, Litopenaeus vannamei
RLNTATTKLAEASQA

SEQ ID NO: 6891 - protein, 15 aa, Litopenaeus vannamei
SNAEGEVAALNRRIQ

SEQ ID NO: 6892 - protein, 15 aa, Litopenaeus vannamei
SLEVSEEKANQREEA

SEQ ID NO: 6893 - protein, 15 aa, Litopenaeus vannamei
AEARAEFAERSVQKL

SEQ ID NO: 6894 - protein, 15 aa, Litopenaeus vannamei
VGNNLKSLEVSEEKA

SEQ ID NO: 6895 - protein, 15 aa, Litopenaeus vannamei
EARAEFAERSVQKLQ

SEQ ID NO: 6896 - protein, 15 aa, Litopenaeus vannamei
VVGNNLKSLEVSEEK

SEQ ID NO: 6897 - protein, 15 aa, Litopenaeus vannamei
TTKLAEASQAADESE

SEQ ID NO: 6898 - protein, 15 aa, Litopenaeus vannamei
LEVSEEKANQREEAY

SEQ ID NO: 6899 - protein, 15 aa, Litopenaeus vannamei
KSLEVSEEKANQREE

SEQ ID NO: 6900 - protein, 15 aa, Litopenaeus vannamei
LRVVGNNLKSLEVSE

SEQ ID NO: 6901 - protein, 15 aa, Litopenaeus vannamei
NLKSLEVSEEKANQR

SEQ ID NO: 6902 - protein, 15 aa, Litopenaeus vannamei
ARFLAEEADRKYDEV

SEQ ID NO: 6903 - protein, 15 aa, Litopenaeus vannamei
GNNLKSLEVSEEKAN

SEQ ID NO: 6904 - protein, 15 aa, Litopenaeus vannamei
AEFAERSVQKLQKEV

SEQ ID NO: 6905 - protein, 15 aa, Litopenaeus vannamei
ELRVVGNNLKSLEVS

SEQ ID NO: 6906 - protein, 15 aa, Litopenaeus vannamei
DKALSNAEGEVAALN

SEQ ID NO: 6907 - protein, 15 aa, Litopenaeus vannamei
NNLKSLEVSEEKANQ

SEQ ID NO: 6908 - protein, 15 aa, Litopenaeus vannamei
RAEFAERSVQKLQKE

SEQ ID NO: 6909 - protein, 15 aa, Litopenaeus vannamei
EKDNAMDRADTLEQQ

SEQ ID NO: 6910 - protein, 15 aa, Litopenaeus vannamei
EVSEEKANQREEAYK

SEQ ID NO: 6911 - protein, 15 aa, Litopenaeus vannamei
RKYDEVARKLAMVEA

SEQ ID NO: 6912 - protein, 15 aa, Litopenaeus vannamei
RKLAMVEADLERAEE

SEQ ID NO: 6913 - protein, 15 aa, Litopenaeus vannamei
KLAMVEADLERAEER

SEQ ID NO: 6914 - protein, 15 aa, Litopenaeus vannamei
KYDEVARKLAMVEAD

SEQ ID NO: 6915 - protein, 15 aa, Litopenaeus vannamei
KEARFLAEEADRKYD

SEQ ID NO: 6916 - protein, 15 aa, Litopenaeus vannamei
MVEADLERAEERAET

SEQ ID NO: 6917 - protein, 15 aa, Litopenaeus vannamei
REEAYKEQIKTLTNK

SEQ ID NO: 6918 - protein, 15 aa, Litopenaeus vannamei
EVARKLAMVEADLER

SEQ ID NO: 6919 - protein, 15 aa, Litopenaeus vannamei
VARKLAMVEADLERA

SEQ ID NO: 6920 - protein, 15 aa, Litopenaeus vannamei
EADLERAEERAETGE

SEQ ID NO: 6921 - protein, 15 aa, Litopenaeus vannamei
RAETGESKIVELEEE

SEQ ID NO: 6922 - protein, 15 aa, Litopenaeus vannamei
GEVAALNRRIQLLEE

SEQ ID NO: 6923 - protein, 15 aa, Litopenaeus vannamei
NAEGEVAALNRRIQL

SEQ ID NO: 6924 - protein, 15 aa, Litopenaeus vannamei
VEADLERAEERAETG

SEQ ID NO: 6925 - protein, 15 aa, Litopenaeus vannamei
ARKLAMVEADLERAE

SEQ ID NO: 6926 - protein, 15 aa, Litopenaeus vannamei
LAMVEADLERAEERA

SEQ ID NO: 6927 - protein, 15 aa, Litopenaeus vannamei
ADLERAEERAETGES

SEQ ID NO: 6928 - protein, 15 aa, Litopenaeus vannamei
EARFLAEEADRKYDE

SEQ ID NO: 6929 - protein, 15 aa, Litopenaeus vannamei
ARAEFAERSVQKLQK

SEQ ID NO: 6930 - protein, 15 aa, Litopenaeus vannamei
LSNAEGEVAALNRRI

SEQ ID NO: 6931 - protein, 15 aa, Litopenaeus vannamei
RMDALENQLKEARFL

SEQ ID NO: 6932 - protein, 15 aa, Litopenaeus vannamei
ERMDALENQLKEARF

SEQ ID NO: 6933 - protein, 15 aa, Litopenaeus vannamei
SEEKANQREEAYKEQ

SEQ ID NO: 6934 - protein, 15 aa, Litopenaeus vannamei
AEERAETGESKIVEL

SEQ ID NO: 6935 - protein, 15 aa, Litopenaeus vannamei
LENQLKEARFLAEEA

SEQ ID NO: 6936 - protein, 15 aa, Litopenaeus vannamei
KANQREEAYKEQIKT

SEQ ID NO: 6937 - protein, 15 aa, Litopenaeus vannamei
DALENQLKEARFLAE

SEQ ID NO: 6938 - protein, 15 aa, Litopenaeus vannamei
SDEERMDALENQLKE

SEQ ID NO: 6939 - protein, 15 aa, Litopenaeus vannamei
ALENQLKEARFLAEE

SEQ ID NO: 6940 - protein, 15 aa, Litopenaeus vannamei
EERMDALENQLKEAR

SEQ ID NO: 6941 - protein, 15 aa, Litopenaeus vannamei
ATTKLAEASQAADES

SEQ ID NO: 6942 - protein, 15 aa, Litopenaeus vannamei
ENRSLSDEERMDALE

SEQ ID NO: 6943 - protein, 15 aa, Litopenaeus vannamei
QQLENDLDQVQESLL

SEQ ID NO: 6944 - protein, 15 aa, Litopenaeus vannamei
VLENRSLSDEERMDA

SEQ ID NO: 6945 - protein, 15 aa, Litopenaeus vannamei
LENRSLSDEERMDAL

SEQ ID NO: 6946 - protein, 15 aa, Litopenaeus vannamei
TKLAEASQAADESER

SEQ ID NO: 6947 - protein, 15 aa, Litopenaeus vannamei
NTATTKLAEASQAAD

SEQ ID NO: 6948 - protein, 15 aa, Litopenaeus vannamei
ADTLEQQNKEANNRA

SEQ ID NO: 6949 - protein, 15 aa, Litopenaeus vannamei
ENQLKEARFLAEEAD

SEQ ID NO: 6950 - protein, 15 aa, Litopenaeus vannamei
ELVNEKEKYKSITDE

SEQ ID NO: 6951 - protein, 15 aa, Litopenaeus vannamei
RKVLENRSLSDEERM

SEQ ID NO: 6952 - protein, 15 aa, Litopenaeus vannamei
ERLNTATTKLAEASQ

SEQ ID NO: 6953 - protein, 15 aa, Litopenaeus vannamei
NQLKEARFLAEEADR

SEQ ID NO: 6954 - protein, 15 aa, Litopenaeus vannamei
NQREEAYKEQIKTLT

SEQ ID NO: 6955 - protein, 15 aa, Litopenaeus vannamei
RSLSDEERMDALENQ

SEQ ID NO: 6956 - protein, 15 aa, Litopenaeus vannamei
RFLAEEADRKYDEVA

SEQ ID NO: 6957 - protein, 14 aa, Litopenaeus vannamei
ITDELDQTFELSGY

SEQ ID NO: 6958 - protein, 15 aa, Litopenaeus vannamei
ALSNAEGEVAALNRR

SEQ ID NO: 6959 - protein, 15 aa, Litopenaeus vannamei
KVLENRSLSDEERMD

SEQ ID NO: 6960 - protein, 15 aa, Litopenaeus vannamei
KDKALSNAEGEVAAL

SEQ ID NO: 6961 - protein, 15 aa, Litopenaeus vannamei
NRSLSDEERMDALEN

SEQ ID NO: 6962 - protein, 15 aa, Litopenaeus vannamei
QREEAYKEQIKTLTN

SEQ ID NO: 6963 - protein, 15 aa, Litopenaeus vannamei
LEKDNAMDRADTLEQ

SEQ ID NO: 6964 - protein, 15 aa, Litopenaeus vannamei
EQIKTLTNKLKAAEA

SEQ ID NO: 6965 - protein, 15 aa, Litopenaeus vannamei
VNEKEKYKSITDELD

SEQ ID NO: 6966 - protein, 15 aa, Litopenaeus vannamei
ERMRKVLENRSLSDE

SEQ ID NO: 6967 - protein, 15 aa, Litopenaeus vannamei
AYKEQIKTLTNKLKA

SEQ ID NO: 6968 - protein, 15 aa, Litopenaeus vannamei
EEKANQREEAYKEQI

SEQ ID NO: 6969 - protein, 15 aa, Litopenaeus vannamei
EKANQREEAYKEQIK

SEQ ID NO: 6970 - protein, 15 aa, Litopenaeus vannamei
MRKVLENRSLSDEER

SEQ ID NO: 6971 - protein, 15 aa, Litopenaeus vannamei
ANQREEAYKEQIKTL

SEQ ID NO: 6972 - protein, 15 aa, Litopenaeus vannamei
LSDEERMDALENQLK

SEQ ID NO: 6973 - protein, 15 aa, Litopenaeus vannamei
MDRADTLEQQNKEAN

SEQ ID NO: 6974 - protein, 15 aa, Litopenaeus vannamei
EERLNTATTKLAEAS

SEQ ID NO: 6975 - protein, 15 aa, Litopenaeus vannamei
EAYKEQIKTLTNKLK

SEQ ID NO: 6976 - protein, 15 aa, Litopenaeus vannamei
SITDELDQTFELSGY

SEQ ID NO: 6977 - protein, 15 aa, Litopenaeus vannamei
KEQIKTLTNKLKAAE

SEQ ID NO: 6978 - protein, 15 aa, Litopenaeus vannamei
SEERLNTATTKLAEA

SEQ ID NO: 6979 - protein, 15 aa, Litopenaeus vannamei
LENDLDQVQESLLKA

SEQ ID NO: 6980 - protein, 15 aa, Litopenaeus vannamei
SLSDEERMDALENQL

SEQ ID NO: 6981 - protein, 15 aa, Litopenaeus vannamei
VHNLQKRMQQLENDL

SEQ ID NO: 6982 - protein, 15 aa, Litopenaeus vannamei
LQKRMQQLENDLDQV

SEQ ID NO: 6983 - protein, 15 aa, Litopenaeus vannamei
ANNRAEKSEEEVHNL

SEQ ID NO: 6984 - protein, 15 aa, Litopenaeus vannamei
EKDKALSNAEGEVAA

SEQ ID NO: 6985 - protein, 15 aa, Litopenaeus vannamei
NKLKAAEARAEFAER

SEQ ID NO: 6986 - protein, 15 aa, Litopenaeus vannamei
DNAMDRADTLEQQNK

SEQ ID NO: 6987 - protein, 15 aa, Litopenaeus vannamei
TATTKLAEASQAADE

SEQ ID NO: 6988 - protein, 15 aa, Litopenaeus vannamei
VEKDKALSNAEGEVA

SEQ ID NO: 6989 - protein, 15 aa, Litopenaeus vannamei
KANIQLVEKDKALSN

SEQ ID NO: 6990 - protein, 15 aa, Litopenaeus vannamei
EVHNLQKRMQQLEND

SEQ ID NO: 6991 - protein, 15 aa, Litopenaeus vannamei
NAMDRADTLEQQNKE

SEQ ID NO: 6992 - protein, 15 aa, Litopenaeus vannamei
YKEQIKTLTNKLKAA

SEQ ID NO: 6993 - protein, 15 aa, Litopenaeus vannamei
LDQVQESLLKANIQL

SEQ ID NO: 6994 - protein, 15 aa, Litopenaeus vannamei
KLKAAEARAEFAERS

SEQ ID NO: 6995 - protein, 15 aa, Litopenaeus vannamei
NKEANNRAEKSEEEV

SEQ ID NO: 6996 - protein, 15 aa, Litopenaeus vannamei
AMDRADTLEQQNKEA

SEQ ID NO: 6997 - protein, 15 aa, Litopenaeus vannamei
RMRKVLENRSLSDEE

SEQ ID NO: 6998 - protein, 15 aa, Litopenaeus vannamei
QLENDLDQVQESLLK

SEQ ID NO: 6999 - protein, 15 aa, Litopenaeus vannamei
NLQKRMQQLENDLDQ

SEQ ID NO: 7000 - protein, 15 aa, Litopenaeus vannamei
AEKSEEEVHNLQKRM

SEQ ID NO: 7001 - protein, 15 aa, Litopenaeus vannamei
KEANNRAEKSEEEVH

SEQ ID NO: 7002 - protein, 15 aa, Litopenaeus vannamei
KDNAMDRADTLEQQN

SEQ ID NO: 7003 - protein, 15 aa, Litopenaeus vannamei
ANIQLVEKDKALSNA

SEQ ID NO: 7004 - protein, 12 aa, Litopenaeus vannamei
DELDQTFELSGY

SEQ ID NO: 7005 - protein, 15 aa, Litopenaeus vannamei
DRADTLEQQNKEANN

SEQ ID NO: 7006 - protein, 15 aa, Litopenaeus vannamei
EEEVHNLQKRMQQLE

SEQ ID NO: 7007 - protein, 15 aa, Litopenaeus vannamei
EQQNKEANNRAEKSE

SEQ ID NO: 7008 - protein, 15 aa, Litopenaeus vannamei
QNKEANNRAEKSEEE

SEQ ID NO: 7009 - protein, 15 aa, Litopenaeus vannamei
NDLDQVQESLLKANI

SEQ ID NO: 7010 - protein, 15 aa, Litopenaeus vannamei
DTLEQQNKEANNRAE

SEQ ID NO: 7011 - protein, 15 aa, Litopenaeus vannamei
QKRMQQLENDLDQVQ

SEQ ID NO: 7012 - protein, 15 aa, Litopenaeus vannamei
DQVQESLLKANIQLV

SEQ ID NO: 7013 - protein, 15 aa, Litopenaeus vannamei
KSEEEVHNLQKRMQQ

SEQ ID NO: 7014 - protein, 15 aa, Litopenaeus vannamei
LEQQNKEANNRAEKS

SEQ ID NO: 7015 - protein, 15 aa, Litopenaeus vannamei
TLEQQNKEANNRAEK

SEQ ID NO: 7016 - protein, 15 aa, Litopenaeus vannamei
QQNKEANNRAEKSEE

SEQ ID NO: 7017 - protein, 15 aa, Litopenaeus vannamei
NNRAEKSEEEVHNLQ

SEQ ID NO: 7018 - protein, 15 aa, Litopenaeus vannamei
KRMQQLENDLDQVQE

SEQ ID NO: 7019 - protein, 15 aa, Litopenaeus vannamei
EANNRAEKSEEEVHN

SEQ ID NO: 7020 - protein, 15 aa, Litopenaeus vannamei
LVEKDKALSNAEGEV

SEQ ID NO: 7021 - protein, 15 aa, Litopenaeus vannamei
SLLKANIQLVEKDKA

SEQ ID NO: 7022 - protein, 15 aa, Litopenaeus vannamei
EEVHNLQKRMQQLEN

SEQ ID NO: 7023 - protein, 15 aa, Litopenaeus vannamei
RAEKSEEEVHNLQKR

SEQ ID NO: 7024 - protein, 15 aa, Litopenaeus vannamei
LKANIQLVEKDKALS

SEQ ID NO: 7025 - protein, 15 aa, Litopenaeus vannamei
ENDLDQVQESLLKAN

SEQ ID NO: 7026 - protein, 15 aa, Litopenaeus vannamei
MQQLENDLDQVQESL

SEQ ID NO: 7027 - protein, 15 aa, Litopenaeus vannamei
IQLVEKDKALSNAEG

SEQ ID NO: 7028 - protein, 15 aa, Litopenaeus vannamei
DLDQVQESLLKANIQ

SEQ ID NO: 7029 - protein, 15 aa, Litopenaeus vannamei
HNLQKRMQQLENDLD

SEQ ID NO: 7030 - protein, 15 aa, Litopenaeus vannamei
NIQLVEKDKALSNAE

SEQ ID NO: 7031 - protein, 15 aa, Litopenaeus vannamei
NRAEKSEEEVHNLQK

SEQ ID NO: 7032 - protein, 15 aa, Litopenaeus vannamei
KTLTNKLKAAEARAE

SEQ ID NO: 7033 - protein, 15 aa, Litopenaeus vannamei
QLVEKDKALSNAEGE

SEQ ID NO: 7034 - protein, 15 aa, Litopenaeus vannamei
QVQESLLKANIQLVE

SEQ ID NO: 7035 - protein, 15 aa, Litopenaeus vannamei
LTNKLKAAEARAEFA

SEQ ID NO: 7036 - protein, 15 aa, Litopenaeus vannamei
TNKLKAAEARAEFAE

SEQ ID NO: 7037 - protein, 15 aa, Litopenaeus vannamei
EKSEEEVHNLQKRMQ

SEQ ID NO: 7038 - protein, 15 aa, Litopenaeus vannamei
RMQQLENDLDQVQES

SEQ ID NO: 7039 - protein, 15 aa, Litopenaeus vannamei
LLKANIQLVEKDKAL

SEQ ID NO: 7040 - protein, 15 aa, Litopenaeus vannamei
VQESLLKANIQLVEK

SEQ ID NO: 7041 - protein, 15 aa, Litopenaeus vannamei
ESLLKANIQLVEKDK

SEQ ID NO: 7042 - protein, 15 aa, Litopenaeus vannamei
QESLLKANIQLVEKD

SEQ ID NO: 7043 - protein, 15 aa, Litopenaeus vannamei
SEEEVHNLQKRMQQL

SEQ ID NO: 7044 - protein, 15 aa, Litopenaeus vannamei
IKTLTNKLKAAEARA

SEQ ID NO: 7045 - protein, 15 aa, Litopenaeus vannamei
QIKTLTNKLKAAEAR

SEQ ID NO: 7046 - protein, 15 aa, Litopenaeus vannamei
TLTNKLKAAEARAEF

SEQ ID NO: 7047 - protein, 15 aa, Metapenaeus ensis
VQKLQKEVDRLEDEL

SEQ ID NO: 7048 - protein, 15 aa, Metapenaeus ensis
EADRKYDEVARKLAM

SEQ ID NO: 7049 - protein, 15 aa, Metapenaeus ensis
AEEADRKYDEVARKL

SEQ ID NO: 7050 - protein, 15 aa, Metapenaeus ensis
LQKEVDRLEDELVNE

SEQ ID NO: 7051 - protein, 15 aa, Metapenaeus ensis
SVQKLQKEVDRLEDE

SEQ ID NO: 7052 - protein, 15 aa, Metapenaeus ensis
QKLQKEVDRLEDELV

SEQ ID NO: 7053 - protein, 15 aa, Metapenaeus ensis
VDRLEDELVNEKEKY

SEQ ID NO: 7054 - protein, 15 aa, Metapenaeus ensis
EVDRLEDELVNEKEK

SEQ ID NO: 7055 - protein, 15 aa, Metapenaeus ensis
RSVQKLQKEVDRLED

SEQ ID NO: 7056 - protein, 15 aa, Metapenaeus ensis
EEADRKYDEVARKLA

SEQ ID NO: 7057 - protein, 15 aa, Metapenaeus ensis
KLQKEVDRLEDELVN

SEQ ID NO: 7058 - protein, 15 aa, Metapenaeus ensis
EEAYKEQIKTLTNKL

SEQ ID NO: 7059 - protein, 15 aa, Metapenaeus ensis
ADESERMRKVLENRS

SEQ ID NO: 7060 - protein, 15 aa, Metapenaeus ensis
QKEVDRLEDELVNEK

SEQ ID NO: 7061 - protein, 15 aa, Metapenaeus ensis
ADRKYDEVARKLAMV

SEQ ID NO: 7062 - protein, 15 aa, Metapenaeus ensis
DRKYDEVARKLAMVE

SEQ ID NO: 7063 - protein, 15 aa, Metapenaeus ensis
DELVNEKEKYKSITD

SEQ ID NO: 7064 - protein, 15 aa, Metapenaeus ensis
LEDELVNEKEKYKSI

SEQ ID NO: 7065 - protein, 15 aa, Metapenaeus ensis
KEVDRLEDELVNEKE

SEQ ID NO: 7066 - protein, 15 aa, Metapenaeus ensis
DRLEDELVNEKEKYK

SEQ ID NO: 7067 - protein, 15 aa, Metapenaeus ensis
ERSVQKLQKEVDRLE

SEQ ID NO: 7068 - protein, 15 aa, Metapenaeus ensis
EDELVNEKEKYKSIT

SEQ ID NO: 7069 - protein, 15 aa, Metapenaeus ensis
RLEDELVNEKEKYKS

SEQ ID NO: 7070 - protein, 15 aa, Metapenaeus ensis
DESERMRKVLENRSL

SEQ ID NO: 7071 - protein, 15 aa, Metapenaeus ensis
LAEASQAADESERMR

SEQ ID NO: 7072 - protein, 15 aa, Metapenaeus ensis
LVNEKEKYKSITDEL

SEQ ID NO: 7073 - protein, 15 aa, Metapenaeus ensis
QAADESERMRKVLEN

SEQ ID NO: 7074 - protein, 15 aa, Metapenaeus ensis
LEEDLERSEERLNTA

SEQ ID NO: 7075 - protein, 15 aa, Metapenaeus ensis
ASQAADESERMRKVL

SEQ ID NO: 7076 - protein, 15 aa, Metapenaeus ensis
AETGESKIVELEEEL

SEQ ID NO: 7077 - protein, 15 aa, Metapenaeus ensis
SQAADESERMRKVLE

SEQ ID NO: 7078 - protein, 15 aa, Metapenaeus ensis
EKEKYKSITDELDQT

SEQ ID NO: 7079 - protein, 15 aa, Metapenaeus ensis
VELEEELRVVGNNLK

SEQ ID NO: 7080 - protein, 15 aa, Metapenaeus ensis
AEASQAADESERMRK

SEQ ID NO: 7081 - protein, 15 aa, Metapenaeus ensis
FAERSVQKLQKEVDR

SEQ ID NO: 7082 - protein, 15 aa, Metapenaeus ensis
VAALNRRIQLLEEDL

SEQ ID NO: 7083 - protein, 15 aa, Metapenaeus ensis
KEKYKSITDELDQTF

SEQ ID NO: 7084 - protein, 15 aa, Metapenaeus ensis
QLLEEDLERSEERLN

SEQ ID NO: 7085 - protein, 15 aa, Metapenaeus ensis
IVELEEELRVVGNNL

SEQ ID NO: 7086 - protein, 15 aa, Metapenaeus ensis
EFAERSVQKLQKEVD

SEQ ID NO: 7087 - protein, 15 aa, Metapenaeus ensis
KSITDELDQTFSELS

SEQ ID NO: 7088 - protein, 15 aa, Metapenaeus ensis
AERSVQKLQKEVDRL

SEQ ID NO: 7089 - protein, 15 aa, Metapenaeus ensis
EKYKSITDELDQTFS

SEQ ID NO: 7090 - protein, 15 aa, Metapenaeus ensis
YKSITDELDQTFSEL

SEQ ID NO: 7091 - protein, 15 aa, Metapenaeus ensis
KYKSITDELDQTFSE

SEQ ID NO: 7092 - protein, 15 aa, Metapenaeus ensis
KIVELEEELRVVGNN

SEQ ID NO: 7093 - protein, 15 aa, Metapenaeus ensis
LEEELRVVGNNLKSL

SEQ ID NO: 7094 - protein, 15 aa, Metapenaeus ensis
AALNRRIQLLEEDLE

SEQ ID NO: 7095 - protein, 15 aa, Metapenaeus ensis
ESERMRKVLENRSLS

SEQ ID NO: 7096 - protein, 15 aa, Metapenaeus ensis
LNRRIQLLEEDLERS

SEQ ID NO: 7097 - protein, 15 aa, Metapenaeus ensis
AADESERMRKVLENR

SEQ ID NO: 7098 - protein, 15 aa, Metapenaeus ensis
ETGESKIVELEEELR

SEQ ID NO: 7099 - protein, 15 aa, Metapenaeus ensis
EELRVVGNNLKSLEV

SEQ ID NO: 7100 - protein, 15 aa, Metapenaeus ensis
ALNRRIQLLEEDLER

SEQ ID NO: 7101 - protein, 15 aa, Metapenaeus ensis
ESKIVELEEELRVVG

SEQ ID NO: 7102 - protein, 15 aa, Metapenaeus ensis
KLEKDNAMDRADTLE

SEQ ID NO: 7103 - protein, 15 aa, Metapenaeus ensis
LLEEDLERSEERLNT

SEQ ID NO: 7104 - protein, 15 aa, Metapenaeus ensis
EEELRVVGNNLKSLE

SEQ ID NO: 7105 - protein, 15 aa, Metapenaeus ensis
FLAEEADRKYDEVAR

SEQ ID NO: 7106 - protein, 15 aa, Metapenaeus ensis
RIQLLEEDLERSEER

SEQ ID NO: 7107 - protein, 15 aa, Metapenaeus ensis
SKIVELEEELRVVGN

SEQ ID NO: 7108 - protein, 15 aa, Metapenaeus ensis
IQLLEEDLERSEERL

SEQ ID NO: 7109 - protein, 15 aa, Metapenaeus ensis
LKEARFLAEEADRKY

SEQ ID NO: 7110 - protein, 15 aa, Metapenaeus ensis
ELEEELRVVGNNLKS

SEQ ID NO: 7111 - protein, 15 aa, Metapenaeus ensis
RVVGNNLKSLEVSEE

SEQ ID NO: 7112 - protein, 15 aa, Metapenaeus ensis
KLAEASQAADESERM

SEQ ID NO: 7113 - protein, 15 aa, Metapenaeus ensis
NEKEKYKSITDELDQ

SEQ ID NO: 7114 - protein, 15 aa, Metapenaeus ensis
NRRIQLLEEDLERSE

SEQ ID NO: 7115 - protein, 15 aa, Metapenaeus ensis
DLERSEERLNTATTK

SEQ ID NO: 7116 - protein, 15 aa, Metapenaeus ensis
EGEVAALNRRIQLLE

SEQ ID NO: 7117 - protein, 15 aa, Metapenaeus ensis
EDLERSEERLNTATT

SEQ ID NO: 7118 - protein, 15 aa, Metapenaeus ensis
DEVARKLAMVEADLE

SEQ ID NO: 7119 - protein, 15 aa, Metapenaeus ensis
VSEEKANQREEAYKE

SEQ ID NO: 7120 - protein, 15 aa, Metapenaeus ensis
LERSEERLNTATTKL

SEQ ID NO: 7121 - protein, 15 aa, Metapenaeus ensis
AEGEVAALNRRIQLL

SEQ ID NO: 7122 - protein, 15 aa, Metapenaeus ensis
LERAEERAETGESKI

SEQ ID NO: 7123 - protein, 15 aa, Metapenaeus ensis
SERMRKVLENRSLSD

SEQ ID NO: 7124 - protein, 15 aa, Metapenaeus ensis
DLERAEERAETGESK

SEQ ID NO: 7125 - protein, 15 aa, Metapenaeus ensis
LAEEADRKYDEVARK

SEQ ID NO: 7126 - protein, 15 aa, Metapenaeus ensis
AMVEADLERAEERAE

SEQ ID NO: 7127 - protein, 11 aa, Metapenaeus ensis
LDQTFSELSGY

SEQ ID NO: 7128 - protein, 15 aa, Metapenaeus ensis
ERAEERAETGESKIV

SEQ ID NO: 7129 - protein, 15 aa, Metapenaeus ensis
YDEVARKLAMVEADL

SEQ ID NO: 7130 - protein, 15 aa, Metapenaeus ensis
EASQAADESERMRKV

SEQ ID NO: 7131 - protein, 15 aa, Metapenaeus ensis
ERAETGESKIVELEE

SEQ ID NO: 7132 - protein, 15 aa, Metapenaeus ensis
EVAALNRRIQLLEED

SEQ ID NO: 7133 - protein, 15 aa, Metapenaeus ensis
TGESKIVELEEELRV

SEQ ID NO: 7134 - protein, 15 aa, Metapenaeus ensis
RRIQLLEEDLERSEE

SEQ ID NO: 7135 - protein, 15 aa, Metapenaeus ensis
RAEERAETGESKIVE

SEQ ID NO: 7136 - protein, 15 aa, Metapenaeus ensis
GESKIVELEEELRVV

SEQ ID NO: 7137 - protein, 15 aa, Metapenaeus ensis
LKSLEVSEEKANQRE

SEQ ID NO: 7138 - protein, 15 aa, Metapenaeus ensis
RSEERLNTATTKLAE

SEQ ID NO: 7139 - protein, 15 aa, Metapenaeus ensis
RADTLEQQNKEANNR

SEQ ID NO: 7140 - protein, 15 aa, Metapenaeus ensis
KALSNAEGEVAALNR

SEQ ID NO: 7141 - protein, 15 aa, Metapenaeus ensis
DEERMDALENQLKEA

SEQ ID NO: 7142 - protein, 15 aa, Metapenaeus ensis
EERAETGESKIVELE

SEQ ID NO: 7143 - protein, 15 aa, Metapenaeus ensis
QLKEARFLAEEADRK

SEQ ID NO: 7144 - protein, 15 aa, Metapenaeus ensis
ERSEERLNTATTKLA

SEQ ID NO: 7145 - protein, 15 aa, Metapenaeus ensis
LNTATTKLAEASQAA

SEQ ID NO: 7146 - protein, 15 aa, Metapenaeus ensis
EEDLERSEERLNTAT

SEQ ID NO: 7147 - protein, 15 aa, Metapenaeus ensis
MDALENQLKEARFLA

SEQ ID NO: 7148 - protein, 14 aa, Metapenaeus ensis
TDELDQTFSELSGY

SEQ ID NO: 7149 - protein, 15 aa, Metapenaeus ensis
RLNTATTKLAEASQA

SEQ ID NO: 7150 - protein, 15 aa, Metapenaeus ensis
SNAEGEVAALNRRIQ

SEQ ID NO: 7151 - protein, 15 aa, Metapenaeus ensis
SLEVSEEKANQREEA

SEQ ID NO: 7152 - protein, 15 aa, Metapenaeus ensis
AEARAEFAERSVQKL

SEQ ID NO: 7153 - protein, 15 aa, Metapenaeus ensis
VGNNLKSLEVSEEKA

SEQ ID NO: 7154 - protein, 15 aa, Metapenaeus ensis
EARAEFAERSVQKLQ

SEQ ID NO: 7155 - protein, 15 aa, Metapenaeus ensis
VVGNNLKSLEVSEEK

SEQ ID NO: 7156 - protein, 15 aa, Metapenaeus ensis
TTKLAEASQAADESE

SEQ ID NO: 7157 - protein, 15 aa, Metapenaeus ensis
LEVSEEKANQREEAY

SEQ ID NO: 7158 - protein, 15 aa, Metapenaeus ensis
KSLEVSEEKANQREE

SEQ ID NO: 7159 - protein, 15 aa, Metapenaeus ensis
LRVVGNNLKSLEVSE

SEQ ID NO: 7160 - protein, 15 aa, Metapenaeus ensis
NLKSLEVSEEKANQR

SEQ ID NO: 7161 - protein, 15 aa, Metapenaeus ensis
ARFLAEEADRKYDEV

SEQ ID NO: 7162 - protein, 15 aa, Metapenaeus ensis
GNNLKSLEVSEEKAN

SEQ ID NO: 7163 - protein, 15 aa, Metapenaeus ensis
AEFAERSVQKLQKEV

SEQ ID NO: 7164 - protein, 15 aa, Metapenaeus ensis
ELRVVGNNLKSLEVS

SEQ ID NO: 7165 - protein, 15 aa, Metapenaeus ensis
DKALSNAEGEVAALN

SEQ ID NO: 7166 - protein, 15 aa, Metapenaeus ensis
NNLKSLEVSEEKANQ

SEQ ID NO: 7167 - protein, 15 aa, Metapenaeus ensis
RAEFAERSVQKLQKE

SEQ ID NO: 7168 - protein, 15 aa, Metapenaeus ensis
EKDNAMDRADTLEQQ

SEQ ID NO: 7169 - protein, 15 aa, Metapenaeus ensis
EVSEEKANQREEAYK

SEQ ID NO: 7170 - protein, 15 aa, Metapenaeus ensis
RKYDEVARKLAMVEA

SEQ ID NO: 7171 - protein, 15 aa, Metapenaeus ensis
RKLAMVEADLERAEE

SEQ ID NO: 7172 - protein, 15 aa, Metapenaeus ensis
KLAMVEADLERAEER

SEQ ID NO: 7173 - protein, 15 aa, Metapenaeus ensis
KYDEVARKLAMVEAD

SEQ ID NO: 7174 - protein, 15 aa, Metapenaeus ensis
KEARFLAEEADRKYD

SEQ ID NO: 7175 - protein, 15 aa, Metapenaeus ensis
MVEADLERAEERAET

SEQ ID NO: 7176 - protein, 15 aa, Metapenaeus ensis
REEAYKEQIKTLTNK

SEQ ID NO: 7177 - protein, 15 aa, Metapenaeus ensis
EVARKLAMVEADLER

SEQ ID NO: 7178 - protein, 15 aa, Metapenaeus ensis
VARKLAMVEADLERA

SEQ ID NO: 7179 - protein, 15 aa, Metapenaeus ensis
EADLERAEERAETGE

SEQ ID NO: 7180 - protein, 15 aa, Metapenaeus ensis
RAETGESKIVELEEE

SEQ ID NO: 7181 - protein, 15 aa, Metapenaeus ensis
GEVAALNRRIQLLEE

SEQ ID NO: 7182 - protein, 15 aa, Metapenaeus ensis
NAEGEVAALNRRIQL

SEQ ID NO: 7183 - protein, 15 aa, Metapenaeus ensis
VEADLERAEERAETG

SEQ ID NO: 7184 - protein, 15 aa, Metapenaeus ensis
ARKLAMVEADLERAE

SEQ ID NO: 7185 - protein, 15 aa, Metapenaeus ensis
LAMVEADLERAEERA

SEQ ID NO: 7186 - protein, 15 aa, Metapenaeus ensis
ADLERAEERAETGES

SEQ ID NO: 7187 - protein, 15 aa, Metapenaeus ensis
EARFLAEEADRKYDE

SEQ ID NO: 7188 - protein, 15 aa, Metapenaeus ensis
ARAEFAERSVQKLQK

SEQ ID NO: 7189 - protein, 15 aa, Metapenaeus ensis
LSNAEGEVAALNRRI

SEQ ID NO: 7190 - protein, 15 aa, Metapenaeus ensis
RMDALENQLKEARFL

SEQ ID NO: 7191 - protein, 15 aa, Metapenaeus ensis
ERMDALENQLKEARF

SEQ ID NO: 7192 - protein, 15 aa, Metapenaeus ensis
LEKDNAMDRADTLEQ

SEQ ID NO: 7193 - protein, 15 aa, Metapenaeus ensis
SEEKANQREEAYKEQ

SEQ ID NO: 7194 - protein, 15 aa, Metapenaeus ensis
AEERAETGESKIVEL

SEQ ID NO: 7195 - protein, 15 aa, Metapenaeus ensis
LENQLKEARFLAEEA

SEQ ID NO: 7196 - protein, 15 aa, Metapenaeus ensis
KANQREEAYKEQIKT

SEQ ID NO: 7197 - protein, 15 aa, Metapenaeus ensis
DALENQLKEARFLAE

SEQ ID NO: 7198 - protein, 15 aa, Metapenaeus ensis
SDEERMDALENQLKE

SEQ ID NO: 7199 - protein, 15 aa, Metapenaeus ensis
ALENQLKEARFLAEE

SEQ ID NO: 7200 - protein, 15 aa, Metapenaeus ensis
EERMDALENQLKEAR

SEQ ID NO: 7201 - protein, 15 aa, Metapenaeus ensis
ATTKLAEASQAADES

SEQ ID NO: 7202 - protein, 15 aa, Metapenaeus ensis
ENRSLSDEERMDALE

SEQ ID NO: 7203 - protein, 15 aa, Metapenaeus ensis
QQLENDLDQVQESLL

SEQ ID NO: 7204 - protein, 15 aa, Metapenaeus ensis
VLENRSLSDEERMDA

SEQ ID NO: 7205 - protein, 15 aa, Metapenaeus ensis
LENRSLSDEERMDAL

SEQ ID NO: 7206 - protein, 15 aa, Metapenaeus ensis
TKLAEASQAADESER

SEQ ID NO: 7207 - protein, 15 aa, Metapenaeus ensis
NTATTKLAEASQAAD

SEQ ID NO: 7208 - protein, 15 aa, Metapenaeus ensis
ADTLEQQNKEANNRA

SEQ ID NO: 7209 - protein, 15 aa, Metapenaeus ensis
ENQLKEARFLAEEAD

SEQ ID NO: 7210 - protein, 15 aa, Metapenaeus ensis
ELVNEKEKYKSITDE

SEQ ID NO: 7211 - protein, 15 aa, Metapenaeus ensis
RKVLENRSLSDEERM

SEQ ID NO: 7212 - protein, 15 aa, Metapenaeus ensis
ERLNTATTKLAEASQ

SEQ ID NO: 7213 - protein, 15 aa, Metapenaeus ensis
NQLKEARFLAEEADR

SEQ ID NO: 7214 - protein, 15 aa, Metapenaeus ensis
NQREEAYKEQIKTLT

SEQ ID NO: 7215 - protein, 15 aa, Metapenaeus ensis
RSLSDEERMDALENQ

SEQ ID NO: 7216 - protein, 15 aa, Metapenaeus ensis
RFLAEEADRKYDEVA

SEQ ID NO: 7217 - protein, 15 aa, Metapenaeus ensis
ALSNAEGEVAALNRR

SEQ ID NO: 7218 - protein, 15 aa, Metapenaeus ensis
KVLENRSLSDEERMD

SEQ ID NO: 7219 - protein, 15 aa, Metapenaeus ensis
ITDELDQTFSELSGY

SEQ ID NO: 7220 - protein, 15 aa, Metapenaeus ensis
KDKALSNAEGEVAAL

SEQ ID NO: 7221 - protein, 15 aa, Metapenaeus ensis
NRSLSDEERMDALEN

SEQ ID NO: 7222 - protein, 15 aa, Metapenaeus ensis
QREEAYKEQIKTLTN

SEQ ID NO: 7223 - protein, 15 aa, Metapenaeus ensis
EQIKTLTNKLKAAEA

SEQ ID NO: 7224 - protein, 15 aa, Metapenaeus ensis
SITDELDQTFSELSG

SEQ ID NO: 7225 - protein, 15 aa, Metapenaeus ensis
VNEKEKYKSITDELD

SEQ ID NO: 7226 - protein, 15 aa, Metapenaeus ensis
ERMRKVLENRSLSDE

SEQ ID NO: 7227 - protein, 15 aa, Metapenaeus ensis
AYKEQIKTLTNKLKA

SEQ ID NO: 7228 - protein, 15 aa, Metapenaeus ensis
EEKANQREEAYKEQI

SEQ ID NO: 7229 - protein, 15 aa, Metapenaeus ensis
EKANQREEAYKEQIK

SEQ ID NO: 7230 - protein, 15 aa, Metapenaeus ensis
MRKVLENRSLSDEER

SEQ ID NO: 7231 - protein, 15 aa, Metapenaeus ensis
ANQREEAYKEQIKTL

SEQ ID NO: 7232 - protein, 15 aa, Metapenaeus ensis
LSDEERMDALENQLK

SEQ ID NO: 7233 - protein, 15 aa, Metapenaeus ensis
MDRADTLEQQNKEAN

SEQ ID NO: 7234 - protein, 15 aa, Metapenaeus ensis
EERLNTATTKLAEAS

SEQ ID NO: 7235 - protein, 15 aa, Metapenaeus ensis
EAYKEQIKTLTNKLK

SEQ ID NO: 7236 - protein, 15 aa, Metapenaeus ensis
KEQIKTLTNKLKAAE

SEQ ID NO: 7237 - protein, 15 aa, Metapenaeus ensis
SEERLNTATTKLAEA

SEQ ID NO: 7238 - protein, 15 aa, Metapenaeus ensis
LENDLDQVQESLLKA

SEQ ID NO: 7239 - protein, 15 aa, Metapenaeus ensis
SLSDEERMDALENQL

SEQ ID NO: 7240 - protein, 15 aa, Metapenaeus ensis
VHNLQKRMQQLENDL

SEQ ID NO: 7241 - protein, 15 aa, Metapenaeus ensis
LQKRMQQLENDLDQV

SEQ ID NO: 7242 - protein, 15 aa, Metapenaeus ensis
ANNRAEKSEEEVHNL

SEQ ID NO: 7243 - protein, 15 aa, Metapenaeus ensis
EKDKALSNAEGEVAA

SEQ ID NO: 7244 - protein, 15 aa, Metapenaeus ensis
NKLKAAEARAEFAER

SEQ ID NO: 7245 - protein, 15 aa, Metapenaeus ensis
DNAMDRADTLEQQNK

SEQ ID NO: 7246 - protein, 15 aa, Metapenaeus ensis
TATTKLAEASQAADE

SEQ ID NO: 7247 - protein, 15 aa, Metapenaeus ensis
VEKDKALSNAEGEVA

SEQ ID NO: 7248 - protein, 15 aa, Metapenaeus ensis
EVHNLQKRMQQLEND

SEQ ID NO: 7249 - protein, 15 aa, Metapenaeus ensis
KANNQLVEKDKALSN

SEQ ID NO: 7250 - protein, 15 aa, Metapenaeus ensis
LDQVQESLLKANNQL

SEQ ID NO: 7251 - protein, 15 aa, Metapenaeus ensis
NAMDRADTLEQQNKE

SEQ ID NO: 7252 - protein, 15 aa, Metapenaeus ensis
YKEQIKTLTNKLKAA

SEQ ID NO: 7253 - protein, 15 aa, Metapenaeus ensis
KLKAAEARAEFAERS

SEQ ID NO: 7254 - protein, 15 aa, Metapenaeus ensis
NKEANNRAEKSEEEV

SEQ ID NO: 7255 - protein, 15 aa, Metapenaeus ensis
AMDRADTLEQQNKEA

SEQ ID NO: 7256 - protein, 15 aa, Metapenaeus ensis
RMRKVLENRSLSDEE

SEQ ID NO: 7257 - protein, 15 aa, Metapenaeus ensis
QLENDLDQVQESLLK

SEQ ID NO: 7258 - protein, 15 aa, Metapenaeus ensis
NLQKRMQQLENDLDQ

SEQ ID NO: 7259 - protein, 15 aa, Metapenaeus ensis
AEKSEEEVHNLQKRM

SEQ ID NO: 7260 - protein, 15 aa, Metapenaeus ensis
KEANNRAEKSEEEVH

SEQ ID NO: 7261 - protein, 15 aa, Metapenaeus ensis
KDNAMDRADTLEQQN

SEQ ID NO: 7262 - protein, 15 aa, Metapenaeus ensis
ANNQLVEKDKALSNA

SEQ ID NO: 7263 - protein, 13 aa, Metapenaeus ensis
DELDQTFSELSGY

SEQ ID NO: 7264 - protein, 15 aa, Metapenaeus ensis
DRADTLEQQNKEANN

SEQ ID NO: 7265 - protein, 15 aa, Metapenaeus ensis
EEEVHNLQKRMQQLE

SEQ ID NO: 7266 - protein, 15 aa, Metapenaeus ensis
EQQNKEANNRAEKSE

SEQ ID NO: 7267 - protein, 15 aa, Metapenaeus ensis
QNKEANNRAEKSEEE

SEQ ID NO: 7268 - protein, 15 aa, Metapenaeus ensis
DTLEQQNKEANNRAE

SEQ ID NO: 7269 - protein, 15 aa, Metapenaeus ensis
QKRMQQLENDLDQVQ

SEQ ID NO: 7270 - protein, 15 aa, Metapenaeus ensis
DQVQESLLKANNQLV

SEQ ID NO: 7271 - protein, 15 aa, Metapenaeus ensis
NDLDQVQESLLKANN

SEQ ID NO: 7272 - protein, 15 aa, Metapenaeus ensis
KSEEEVHNLQKRMQQ

SEQ ID NO: 7273 - protein, 15 aa, Metapenaeus ensis
LEQQNKEANNRAEKS

SEQ ID NO: 7274 - protein, 15 aa, Metapenaeus ensis
TLEQQNKEANNRAEK

SEQ ID NO: 7275 - protein, 15 aa, Metapenaeus ensis
QQNKEANNRAEKSEE

SEQ ID NO: 7276 - protein, 15 aa, Metapenaeus ensis
NNRAEKSEEEVHNLQ

SEQ ID NO: 7277 - protein, 15 aa, Metapenaeus ensis
KRMQQLENDLDQVQE

SEQ ID NO: 7278 - protein, 15 aa, Metapenaeus ensis
EANNRAEKSEEEVHN

SEQ ID NO: 7279 - protein, 15 aa, Metapenaeus ensis
LVEKDKALSNAEGEV

SEQ ID NO: 7280 - protein, 15 aa, Metapenaeus ensis
EEVHNLQKRMQQLEN

SEQ ID NO: 7281 - protein, 15 aa, Metapenaeus ensis
SLLKANNQLVEKDKA

SEQ ID NO: 7282 - protein, 15 aa, Metapenaeus ensis
RAEKSEEEVHNLQKR

SEQ ID NO: 7283 - protein, 15 aa, Metapenaeus ensis
LKANNQLVEKDKALS

SEQ ID NO: 7284 - protein, 15 aa, Metapenaeus ensis
QLVEKDKALSNAEGE

SEQ ID NO: 7285 - protein, 15 aa, Metapenaeus ensis
ENDLDQVQESLLKAN

SEQ ID NO: 7286 - protein, 15 aa, Metapenaeus ensis
MQQLENDLDQVQESL

SEQ ID NO: 7287 - protein, 15 aa, Metapenaeus ensis
HNLQKRMQQLENDLD

SEQ ID NO: 7288 - protein, 15 aa, Metapenaeus ensis
DLDQVQESLLKANNQ

SEQ ID NO: 7289 - protein, 15 aa, Metapenaeus ensis
NNQLVEKDKALSNAE

SEQ ID NO: 7290 - protein, 15 aa, Metapenaeus ensis
NQLVEKDKALSNAEG

SEQ ID NO: 7291 - protein, 15 aa, Metapenaeus ensis
NRAEKSEEEVHNLQK

SEQ ID NO: 7292 - protein, 15 aa, Metapenaeus ensis
KTLTNKLKAAEARAE

SEQ ID NO: 7293 - protein, 15 aa, Metapenaeus ensis
QVQESLLKANNQLVE

SEQ ID NO: 7294 - protein, 15 aa, Metapenaeus ensis
LTNKLKAAEARAEFA

SEQ ID NO: 7295 - protein, 15 aa, Metapenaeus ensis
TNKLKAAEARAEFAE

SEQ ID NO: 7296 - protein, 15 aa, Metapenaeus ensis
EKSEEEVHNLQKRMQ

SEQ ID NO: 7297 - protein, 15 aa, Metapenaeus ensis
RMQQLENDLDQVQES

SEQ ID NO: 7298 - protein, 15 aa, Metapenaeus ensis
VQESLLKANNQLVEK

SEQ ID NO: 7299 - protein, 15 aa, Metapenaeus ensis
QESLLKANNQLVEKD

SEQ ID NO: 7300 - protein, 15 aa, Metapenaeus ensis
ESLLKANNQLVEKDK

SEQ ID NO: 7301 - protein, 15 aa, Metapenaeus ensis
SEEEVHNLQKRMQQL

SEQ ID NO: 7302 - protein, 15 aa, Metapenaeus ensis
LLKANNQLVEKDKAL

SEQ ID NO: 7303 - protein, 15 aa, Metapenaeus ensis
IKTLTNKLKAAEARA

SEQ ID NO: 7304 - protein, 15 aa, Metapenaeus ensis
QIKTLTNKLKAAEAR

SEQ ID NO: 7305 - protein, 15 aa, Metapenaeus ensis
TLTNKLKAAEARAEF

SEQ ID NO: 7306 - protein, 15 aa, Oratosquilla oratoria
VQKLQKEVDRLEDEL

SEQ ID NO: 7307 - protein, 15 aa, Oratosquilla oratoria
EADRKYDEVARKLAM

SEQ ID NO: 7308 - protein, 15 aa, Oratosquilla oratoria
AEEADRKYDEVARKL

SEQ ID NO: 7309 - protein, 15 aa, Oratosquilla oratoria
LQKEVDRLEDELVNE

SEQ ID NO: 7310 - protein, 15 aa, Oratosquilla oratoria
SVQKLQKEVDRLEDE

SEQ ID NO: 7311 - protein, 15 aa, Oratosquilla oratoria
QKLQKEVDRLEDELV

SEQ ID NO: 7312 - protein, 15 aa, Oratosquilla oratoria
EVDRLEDELVNEKEK

SEQ ID NO: 7313 - protein, 15 aa, Oratosquilla oratoria
RSVQKLQKEVDRLED

SEQ ID NO: 7314 - protein, 15 aa, Oratosquilla oratoria
EEADRKYDEVARKLA

SEQ ID NO: 7315 - protein, 15 aa, Oratosquilla oratoria
KLQKEVDRLEDELVN

SEQ ID NO: 7316 - protein, 15 aa, Oratosquilla oratoria
ADESERMRKVLENRS

SEQ ID NO: 7317 - protein, 15 aa, Oratosquilla oratoria
QKEVDRLEDELVNEK

SEQ ID NO: 7318 - protein, 15 aa, Oratosquilla oratoria
ADRKYDEVARKLAMV

SEQ ID NO: 7319 - protein, 15 aa, Oratosquilla oratoria
DRKYDEVARKLAMVE

SEQ ID NO: 7320 - protein, 15 aa, Oratosquilla oratoria
DELVNEKEKYKSITD

SEQ ID NO: 7321 - protein, 15 aa, Oratosquilla oratoria
LEDELVNEKEKYKSI

SEQ ID NO: 7322 - protein, 15 aa, Oratosquilla oratoria
VDRLEDELVNEKEKY

SEQ ID NO: 7323 - protein, 15 aa, Oratosquilla oratoria
KEVDRLEDELVNEKE

SEQ ID NO: 7324 - protein, 15 aa, Oratosquilla oratoria
DRLEDELVNEKEKYK

SEQ ID NO: 7325 - protein, 15 aa, Oratosquilla oratoria
EEAYKEQIKQLTNKL

SEQ ID NO: 7326 - protein, 15 aa, Oratosquilla oratoria
ERSVQKLQKEVDRLE

SEQ ID NO: 7327 - protein, 15 aa, Oratosquilla oratoria
DAIKKKMQAMKLEKD

SEQ ID NO: 7328 - protein, 15 aa, Oratosquilla oratoria
EDELVNEKEKYKSIT

SEQ ID NO: 7329 - protein, 15 aa, Oratosquilla oratoria
RLEDELVNEKEKYKS

SEQ ID NO: 7330 - protein, 15 aa, Oratosquilla oratoria
DESERMRKVLENRSL

SEQ ID NO: 7331 - protein, 15 aa, Oratosquilla oratoria
LAEASQAADESERMR

SEQ ID NO: 7332 - protein, 15 aa, Oratosquilla oratoria
LEEDLERSEERLNTA

SEQ ID NO: 7333 - protein, 15 aa, Oratosquilla oratoria
LVNEKEKYKSITDEL

SEQ ID NO: 7334 - protein, 15 aa, Oratosquilla oratoria
QAADESERMRKVLEN

SEQ ID NO: 7335 - protein, 15 aa, Oratosquilla oratoria
AIKKKMQAMKLEKDN

SEQ ID NO: 7336 - protein, 15 aa, Oratosquilla oratoria
ASQAADESERMRKVL

SEQ ID NO: 7337 - protein, 15 aa, Oratosquilla oratoria
AETGESKIVELEEEL

SEQ ID NO: 7338 - protein, 15 aa, Oratosquilla oratoria
IKKKMQAMKLEKDNA

SEQ ID NO: 7339 - protein, 15 aa, Oratosquilla oratoria
SQAADESERMRKVLE

SEQ ID NO: 7340 - protein, 15 aa, Oratosquilla oratoria
EKEKYKSITDELDQT

SEQ ID NO: 7341 - protein, 15 aa, Oratosquilla oratoria
VELEEELRVVGNNLK

SEQ ID NO: 7342 - protein, 15 aa, Oratosquilla oratoria
AEASQAADESERMRK

SEQ ID NO: 7343 - protein, 15 aa, Oratosquilla oratoria
FAERSVQKLQKEVDR

SEQ ID NO: 7344 - protein, 15 aa, Oratosquilla oratoria
VAALNRRIQLLEEDL

SEQ ID NO: 7345 - protein, 15 aa, Oratosquilla oratoria
KEKYKSITDELDQTF

SEQ ID NO: 7346 - protein, 15 aa, Oratosquilla oratoria
QLLEEDLERSEERLN

SEQ ID NO: 7347 - protein, 15 aa, Oratosquilla oratoria
IVELEEELRVVGNNL

SEQ ID NO: 7348 - protein, 15 aa, Oratosquilla oratoria
KIVELEEELRVVGNN

SEQ ID NO: 7349 - protein, 15 aa, Oratosquilla oratoria
EFAERSVQKLQKEVD

SEQ ID NO: 7350 - protein, 15 aa, Oratosquilla oratoria
KSITDELDQTFSELS

SEQ ID NO: 7351 - protein, 15 aa, Oratosquilla oratoria
AERSVQKLQKEVDRL

SEQ ID NO: 7352 - protein, 15 aa, Oratosquilla oratoria
EKYKSITDELDQTFS

SEQ ID NO: 7353 - protein, 15 aa, Oratosquilla oratoria
YKSITDELDQTFSEL

SEQ ID NO: 7354 - protein, 15 aa, Oratosquilla oratoria
KYKSITDELDQTFSE

SEQ ID NO: 7355 - protein, 15 aa, Oratosquilla oratoria
LEEELRVVGNNLKSL

SEQ ID NO: 7356 - protein, 15 aa, Oratosquilla oratoria
AALNRRIQLLEEDLE

SEQ ID NO: 7357 - protein, 15 aa, Oratosquilla oratoria
ESERMRKVLENRSLS

SEQ ID NO: 7358 - protein, 15 aa, Oratosquilla oratoria
LNRRIQLLEEDLERS

SEQ ID NO: 7359 - protein, 15 aa, Oratosquilla oratoria
AADESERMRKVLENR

SEQ ID NO: 7360 - protein, 15 aa, Oratosquilla oratoria
ETGESKIVELEEELR

SEQ ID NO: 7361 - protein, 15 aa, Oratosquilla oratoria
EELRVVGNNLKSLEV

SEQ ID NO: 7362 - protein, 15 aa, Oratosquilla oratoria
KKKMQAMKLEKDNAM

SEQ ID NO: 7363 - protein, 15 aa, Oratosquilla oratoria
ALNRRIQLLEEDLER

SEQ ID NO: 7364 - protein, 15 aa, Oratosquilla oratoria
ESKIVELEEELRVVG

SEQ ID NO: 7365 - protein, 15 aa, Oratosquilla oratoria
LLEEDLERSEERLNT

SEQ ID NO: 7366 - protein, 15 aa, Oratosquilla oratoria
EEELRVVGNNLKSLE

SEQ ID NO: 7367 - protein, 15 aa, Oratosquilla oratoria
FLAEEADRKYDEVAR

SEQ ID NO: 7368 - protein, 15 aa, Oratosquilla oratoria
RIQLLEEDLERSEER

SEQ ID NO: 7369 - protein, 15 aa, Oratosquilla oratoria
SKIVELEEELRVVGN

SEQ ID NO: 7370 - protein, 15 aa, Oratosquilla oratoria
IQLLEEDLERSEERL

SEQ ID NO: 7371 - protein, 15 aa, Oratosquilla oratoria
LKEARFLAEEADRKY

SEQ ID NO: 7372 - protein, 15 aa, Oratosquilla oratoria
ELEEELRVVGNNLKS

SEQ ID NO: 7373 - protein, 15 aa, Oratosquilla oratoria
RVVGNNLKSLEVSEE

SEQ ID NO: 7374 - protein, 15 aa, Oratosquilla oratoria
KLAEASQAADESERM

SEQ ID NO: 7375 - protein, 15 aa, Oratosquilla oratoria
NEKEKYKSITDELDQ

SEQ ID NO: 7376 - protein, 15 aa, Oratosquilla oratoria
NRRIQLLEEDLERSE

SEQ ID NO: 7377 - protein, 15 aa, Oratosquilla oratoria
KLEKDNAMDRADTLE

SEQ ID NO: 7378 - protein, 15 aa, Oratosquilla oratoria
DLERSEERLNTATTK

SEQ ID NO: 7379 - protein, 15 aa, Oratosquilla oratoria
EGEVAALNRRIQLLE

SEQ ID NO: 7380 - protein, 15 aa, Oratosquilla oratoria
EDLERSEERLNTATT

SEQ ID NO: 7381 - protein, 15 aa, Oratosquilla oratoria
DEVARKLAMVEADLE

SEQ ID NO: 7382 - protein, 15 aa, Oratosquilla oratoria
VSEEKANQREEAYKE

SEQ ID NO: 7383 - protein, 15 aa, Oratosquilla oratoria
LERSEERLNTATTKL

SEQ ID NO: 7384 - protein, 15 aa, Oratosquilla oratoria
NAEGEVAALNRRIQL

SEQ ID NO: 7385 - protein, 15 aa, Oratosquilla oratoria
LERAEERAETGESKI

SEQ ID NO: 7386 - protein, 15 aa, Oratosquilla oratoria
SERMRKVLENRSLSD

SEQ ID NO: 7387 - protein, 15 aa, Oratosquilla oratoria
KKMQAMKLEKDNAMD

SEQ ID NO: 7388 - protein, 15 aa, Oratosquilla oratoria
DLERAEERAETGESK

SEQ ID NO: 7389 - protein, 15 aa, Oratosquilla oratoria
KMQAMKLEKDNAMDR

SEQ ID NO: 7390 - protein, 15 aa, Oratosquilla oratoria
LAEEADRKYDEVARK

SEQ ID NO: 7391 - protein, 15 aa, Oratosquilla oratoria
AMVEADLERAEERAE

SEQ ID NO: 7392 - protein, 11 aa, Oratosquilla oratoria
LDQTFSELSGY

SEQ ID NO: 7393 - protein, 15 aa, Oratosquilla oratoria
ERAEERAETGESKIV

SEQ ID NO: 7394 - protein, 15 aa, Oratosquilla oratoria
YDEVARKLAMVEADL

SEQ ID NO: 7395 - protein, 15 aa, Oratosquilla oratoria
AMKLEKDNAMDRADT

SEQ ID NO: 7396 - protein, 15 aa, Oratosquilla oratoria
EASQAADESERMRKV

SEQ ID NO: 7397 - protein, 15 aa, Oratosquilla oratoria
LQNAEGEVAALNRRI

SEQ ID NO: 7398 - protein, 15 aa, Oratosquilla oratoria
ERAETGESKIVELEE

SEQ ID NO: 7399 - protein, 15 aa, Oratosquilla oratoria
EVAALNRRIQLLEED

SEQ ID NO: 7400 - protein, 15 aa, Oratosquilla oratoria
TGESKIVELEEELRV

SEQ ID NO: 7401 - protein, 15 aa, Oratosquilla oratoria
QAMKLEKDNAMDRAD

SEQ ID NO: 7402 - protein, 15 aa, Oratosquilla oratoria
MQAMKLEKDNAMDRA

SEQ ID NO: 7403 - protein, 15 aa, Oratosquilla oratoria
RRIQLLEEDLERSEE

SEQ ID NO: 7404 - protein, 15 aa, Oratosquilla oratoria
MKLEKDNAMDRADTL

SEQ ID NO: 7405 - protein, 15 aa, Oratosquilla oratoria
RAEERAETGESKIVE

SEQ ID NO: 7406 - protein, 15 aa, Oratosquilla oratoria
LKSLEVSEEKANQRE

SEQ ID NO: 7407 - protein, 15 aa, Oratosquilla oratoria
RSEERLNTATTKLAE

SEQ ID NO: 7408 - protein, 15 aa, Oratosquilla oratoria
RADTLEQQNKEANNR

SEQ ID NO: 7409 - protein, 15 aa, Oratosquilla oratoria
KALQNAEGEVAALNR

SEQ ID NO: 7410 - protein, 15 aa, Oratosquilla oratoria
DEERMDALENQLKEA

SEQ ID NO: 7411 - protein, 15 aa, Oratosquilla oratoria
GESKIVELEEELRVV

SEQ ID NO: 7412 - protein, 15 aa, Oratosquilla oratoria
EERAETGESKIVELE

SEQ ID NO: 7413 - protein, 15 aa, Oratosquilla oratoria
QLKEARFLAEEADRK

SEQ ID NO: 7414 - protein, 15 aa, Oratosquilla oratoria
ERSEERLNTATTKLA

SEQ ID NO: 7415 - protein, 15 aa, Oratosquilla oratoria
LNTATTKLAEASQAA

SEQ ID NO: 7416 - protein, 15 aa, Oratosquilla oratoria
AEGEVAALNRRIQLL

SEQ ID NO: 7417 - protein, 15 aa, Oratosquilla oratoria
EEDLERSEERLNTAT

SEQ ID NO: 7418 - protein, 15 aa, Oratosquilla oratoria
MDALENQLKEARFLA

SEQ ID NO: 7419 - protein, 14 aa, Oratosquilla oratoria
TDELDQTFSELSGY

SEQ ID NO: 7420 - protein, 15 aa, Oratosquilla oratoria
RLNTATTKLAEASQA

SEQ ID NO: 7421 - protein, 15 aa, Oratosquilla oratoria
QNAEGEVAALNRRIQ

SEQ ID NO: 7422 - protein, 15 aa, Oratosquilla oratoria
SLEVSEEKANQREEA

SEQ ID NO: 7423 - protein, 15 aa, Oratosquilla oratoria
AEARAEFAERSVQKL

SEQ ID NO: 7424 - protein, 15 aa, Oratosquilla oratoria
VGNNLKSLEVSEEKA

SEQ ID NO: 7425 - protein, 15 aa, Oratosquilla oratoria
EARAEFAERSVQKLQ

SEQ ID NO: 7426 - protein, 15 aa, Oratosquilla oratoria
VVGNNLKSLEVSEEK

SEQ ID NO: 7427 - protein, 15 aa, Oratosquilla oratoria
TTKLAEASQAADESE

SEQ ID NO: 7428 - protein, 15 aa, Oratosquilla oratoria
LEVSEEKANQREEAY

SEQ ID NO: 7429 - protein, 15 aa, Oratosquilla oratoria
KSLEVSEEKANQREE

SEQ ID NO: 7430 - protein, 15 aa, Oratosquilla oratoria
LRVVGNNLKSLEVSE

SEQ ID NO: 7431 - protein, 15 aa, Oratosquilla oratoria
DKALQNAEGEVAALN

SEQ ID NO: 7432 - protein, 15 aa, Oratosquilla oratoria
NLKSLEVSEEKANQR

SEQ ID NO: 7433 - protein, 15 aa, Oratosquilla oratoria
ARFLAEEADRKYDEV

SEQ ID NO: 7434 - protein, 15 aa, Oratosquilla oratoria
GNNLKSLEVSEEKAN

SEQ ID NO: 7435 - protein, 15 aa, Oratosquilla oratoria
AEFAERSVQKLQKEV

SEQ ID NO: 7436 - protein, 15 aa, Oratosquilla oratoria
ELRVVGNNLKSLEVS

SEQ ID NO: 7437 - protein, 15 aa, Oratosquilla oratoria
NNLKSLEVSEEKANQ

SEQ ID NO: 7438 - protein, 15 aa, Oratosquilla oratoria
RAEFAERSVQKLQKE

SEQ ID NO: 7439 - protein, 15 aa, Oratosquilla oratoria
EKDNAMDRADTLEQQ

SEQ ID NO: 7440 - protein, 15 aa, Oratosquilla oratoria
EVSEEKANQREEAYK

SEQ ID NO: 7441 - protein, 15 aa, Oratosquilla oratoria
RKYDEVARKLAMVEA

SEQ ID NO: 7442 - protein, 15 aa, Oratosquilla oratoria
RKLAMVEADLERAEE

SEQ ID NO: 7443 - protein, 15 aa, Oratosquilla oratoria
KLAMVEADLERAEER

SEQ ID NO: 7444 - protein, 15 aa, Oratosquilla oratoria
KYDEVARKLAMVEAD

SEQ ID NO: 7445 - protein, 15 aa, Oratosquilla oratoria
KEARFLAEEADRKYD

SEQ ID NO: 7446 - protein, 15 aa, Oratosquilla oratoria
MVEADLERAEERAET

SEQ ID NO: 7447 - protein, 15 aa, Oratosquilla oratoria
EVARKLAMVEADLER

SEQ ID NO: 7448 - protein, 15 aa, Oratosquilla oratoria
VARKLAMVEADLERA

SEQ ID NO: 7449 - protein, 15 aa, Oratosquilla oratoria
EADLERAEERAETGE

SEQ ID NO: 7450 - protein, 15 aa, Oratosquilla oratoria
RAETGESKIVELEEE

SEQ ID NO: 7451 - protein, 15 aa, Oratosquilla oratoria
GEVAALNRRIQLLEE

SEQ ID NO: 7452 - protein, 15 aa, Oratosquilla oratoria
REEAYKEQIKQLTNK

SEQ ID NO: 7453 - protein, 15 aa, Oratosquilla oratoria
VEADLERAEERAETG

SEQ ID NO: 7454 - protein, 15 aa, Oratosquilla oratoria
ARKLAMVEADLERAE

SEQ ID NO: 7455 - protein, 15 aa, Oratosquilla oratoria
LAMVEADLERAEERA

SEQ ID NO: 7456 - protein, 15 aa, Oratosquilla oratoria
ADLERAEERAETGES

SEQ ID NO: 7457 - protein, 15 aa, Oratosquilla oratoria
EARFLAEEADRKYDE

SEQ ID NO: 7458 - protein, 15 aa, Oratosquilla oratoria
ARAEFAERSVQKLQK

SEQ ID NO: 7459 - protein, 15 aa, Oratosquilla oratoria
ALQNAEGEVAALNRR

SEQ ID NO: 7460 - protein, 15 aa, Oratosquilla oratoria
RMDALENQLKEARFL

SEQ ID NO: 7461 - protein, 15 aa, Oratosquilla oratoria
ERMDALENQLKEARF

SEQ ID NO: 7462 - protein, 15 aa, Oratosquilla oratoria
KANQREEAYKEQIKQ

SEQ ID NO: 7463 - protein, 15 aa, Oratosquilla oratoria
SEEKANQREEAYKEQ

SEQ ID NO: 7464 - protein, 15 aa, Oratosquilla oratoria
AEERAETGESKIVEL

SEQ ID NO: 7465 - protein, 15 aa, Oratosquilla oratoria
LENQLKEARFLAEEA

SEQ ID NO: 7466 - protein, 15 aa, Oratosquilla oratoria
DALENQLKEARFLAE

SEQ ID NO: 7467 - protein, 15 aa, Oratosquilla oratoria
SDEERMDALENQLKE

SEQ ID NO: 7468 - protein, 15 aa, Oratosquilla oratoria
ALENQLKEARFLAEE

SEQ ID NO: 7469 - protein, 15 aa, Oratosquilla oratoria
EERMDALENQLKEAR

SEQ ID NO: 7470 - protein, 15 aa, Oratosquilla oratoria
ATTKLAEASQAADES

SEQ ID NO: 7471 - protein, 15 aa, Oratosquilla oratoria
ENRSLSDEERMDALE

SEQ ID NO: 7472 - protein, 15 aa, Oratosquilla oratoria
VLENRSLSDEERMDA

SEQ ID NO: 7473 - protein, 15 aa, Oratosquilla oratoria
LENRSLSDEERMDAL

SEQ ID NO: 7474 - protein, 15 aa, Oratosquilla oratoria
TKLAEASQAADESER

SEQ ID NO: 7475 - protein, 15 aa, Oratosquilla oratoria
NTATTKLAEASQAAD

SEQ ID NO: 7476 - protein, 15 aa, Oratosquilla oratoria
QQLENDLDQVQEQLL

SEQ ID NO: 7477 - protein, 15 aa, Oratosquilla oratoria
ADTLEQQNKEANNRA

SEQ ID NO: 7478 - protein, 15 aa, Oratosquilla oratoria
ENQLKEARFLAEEAD

SEQ ID NO: 7479 - protein, 15 aa, Oratosquilla oratoria
ELVNEKEKYKSITDE

SEQ ID NO: 7480 - protein, 15 aa, Oratosquilla oratoria
RKVLENRSLSDEERM

SEQ ID NO: 7481 - protein, 15 aa, Oratosquilla oratoria
ERLNTATTKLAEASQ

SEQ ID NO: 7482 - protein, 15 aa, Oratosquilla oratoria
NQLKEARFLAEEADR

SEQ ID NO: 7483 - protein, 15 aa, Oratosquilla oratoria
RSLSDEERMDALENQ

SEQ ID NO: 7484 - protein, 15 aa, Oratosquilla oratoria
RFLAEEADRKYDEVA

SEQ ID NO: 7485 - protein, 15 aa, Oratosquilla oratoria
KVLENRSLSDEERMD

SEQ ID NO: 7486 - protein, 15 aa, Oratosquilla oratoria
KDKALQNAEGEVAAL

SEQ ID NO: 7487 - protein, 15 aa, Oratosquilla oratoria
ITDELDQTFSELSGY

SEQ ID NO: 7488 - protein, 15 aa, Oratosquilla oratoria
NRSLSDEERMDALEN

SEQ ID NO: 7489 - protein, 15 aa, Oratosquilla oratoria
LEKDNAMDRADTLEQ

SEQ ID NO: 7490 - protein, 15 aa, Oratosquilla oratoria
KANTQLEEKDKALQN

SEQ ID NO: 7491 - protein, 15 aa, Oratosquilla oratoria
SITDELDQTFSELSG

SEQ ID NO: 7492 - protein, 15 aa, Oratosquilla oratoria
VNEKEKYKSITDELD

SEQ ID NO: 7493 - protein, 15 aa, Oratosquilla oratoria
EQIKQLTNKLKAAEA

SEQ ID NO: 7494 - protein, 15 aa, Oratosquilla oratoria
ERMRKVLENRSLSDE

SEQ ID NO: 7495 - protein, 15 aa, Oratosquilla oratoria
EEKANQREEAYKEQI

SEQ ID NO: 7496 - protein, 15 aa, Oratosquilla oratoria
EKANQREEAYKEQIK

SEQ ID NO: 7497 - protein, 15 aa, Oratosquilla oratoria
NQREEAYKEQIKQLT

SEQ ID NO: 7498 - protein, 15 aa, Oratosquilla oratoria
MRKVLENRSLSDEER

SEQ ID NO: 7499 - protein, 15 aa, Oratosquilla oratoria
LSDEERMDALENQLK

SEQ ID NO: 7500 - protein, 15 aa, Oratosquilla oratoria
MDRADTLEQQNKEAN

SEQ ID NO: 7501 - protein, 15 aa, Oratosquilla oratoria
EERLNTATTKLAEAS

SEQ ID NO: 7502 - protein, 15 aa, Oratosquilla oratoria
ANQREEAYKEQIKQL

SEQ ID NO: 7503 - protein, 15 aa, Oratosquilla oratoria
EAYKEQIKQLTNKLK

SEQ ID NO: 7504 - protein, 15 aa, Oratosquilla oratoria
AYKEQIKQLTNKLKA

SEQ ID NO: 7505 - protein, 15 aa, Oratosquilla oratoria
SEERLNTATTKLAEA

SEQ ID NO: 7506 - protein, 15 aa, Oratosquilla oratoria
EEKDKALQNAEGEVA

SEQ ID NO: 7507 - protein, 15 aa, Oratosquilla oratoria
QREEAYKEQIKQLTN

SEQ ID NO: 7508 - protein, 15 aa, Oratosquilla oratoria
EKDKALQNAEGEVAA

SEQ ID NO: 7509 - protein, 15 aa, Oratosquilla oratoria
KEQIKQLTNKLKAAE

SEQ ID NO: 7510 - protein, 15 aa, Oratosquilla oratoria
QLEEKDKALQNAEGE

SEQ ID NO: 7511 - protein, 15 aa, Oratosquilla oratoria
SLSDEERMDALENQL

SEQ ID NO: 7512 - protein, 15 aa, Oratosquilla oratoria
VHNLQKRMQQLENDL

SEQ ID NO: 7513 - protein, 15 aa, Oratosquilla oratoria
LQKRMQQLENDLDQV

SEQ ID NO: 7514 - protein, 15 aa, Oratosquilla oratoria
LENDLDQVQEQLLKA

SEQ ID NO: 7515 - protein, 15 aa, Oratosquilla oratoria
NKLKAAEARAEFAER

SEQ ID NO: 7516 - protein, 15 aa, Oratosquilla oratoria
DNAMDRADTLEQQNK

SEQ ID NO: 7517 - protein, 15 aa, Oratosquilla oratoria
QLENDLDQVQEQLLK

SEQ ID NO: 7518 - protein, 15 aa, Oratosquilla oratoria
TATTKLAEASQAADE

SEQ ID NO: 7519 - protein, 15 aa, Oratosquilla oratoria
EVHNLQKRMQQLEND

SEQ ID NO: 7520 - protein, 15 aa, Oratosquilla oratoria
YKEQIKQLTNKLKAA

SEQ ID NO: 7521 - protein, 15 aa, Oratosquilla oratoria
ANNRAEKAEEEVHNL

SEQ ID NO: 7522 - protein, 15 aa, Oratosquilla oratoria
NAMDRADTLEQQNKE

SEQ ID NO: 7523 - protein, 15 aa, Oratosquilla oratoria
LDQVQEQLLKANTQL

SEQ ID NO: 7524 - protein, 15 aa, Oratosquilla oratoria
KEANNRAEKAEEEVH

SEQ ID NO: 7525 - protein, 15 aa, Oratosquilla oratoria
KLKAAEARAEFAERS

SEQ ID NO: 7526 - protein, 15 aa, Oratosquilla oratoria
RMRKVLENRSLSDEE

SEQ ID NO: 7527 - protein, 15 aa, Oratosquilla oratoria
NKEANNRAEKAEEEV

SEQ ID NO: 7528 - protein, 15 aa, Oratosquilla oratoria
NLQKRMQQLENDLDQ

SEQ ID NO: 7529 - protein, 15 aa, Oratosquilla oratoria
AMDRADTLEQQNKEA

SEQ ID NO: 7530 - protein, 15 aa, Oratosquilla oratoria
QNKEANNRAEKAEEE

SEQ ID NO: 7531 - protein, 15 aa, Oratosquilla oratoria
KDNAMDRADTLEQQN

SEQ ID NO: 7532 - protein, 13 aa, Oratosquilla oratoria
DELDQTFSELSGY

SEQ ID NO: 7533 - protein, 15 aa, Oratosquilla oratoria
KAEEEVHNLQKRMQQ

SEQ ID NO: 7534 - protein, 15 aa, Oratosquilla oratoria
ANTQLEEKDKALQNA

SEQ ID NO: 7535 - protein, 15 aa, Oratosquilla oratoria
DRADTLEQQNKEANN

SEQ ID NO: 7536 - protein, 15 aa, Oratosquilla oratoria
EQQNKEANNRAEKAE

SEQ ID NO: 7537 - protein, 15 aa, Oratosquilla oratoria
DTLEQQNKEANNRAE

SEQ ID NO: 7538 - protein, 15 aa, Oratosquilla oratoria
QKRMQQLENDLDQVQ

SEQ ID NO: 7539 - protein, 15 aa, Oratosquilla oratoria
NDLDQVQEQLLKANT

SEQ ID NO: 7540 - protein, 15 aa, Oratosquilla oratoria
QQNKEANNRAEKAEE

SEQ ID NO: 7541 - protein, 15 aa, Oratosquilla oratoria
DQVQEQLLKANTQLE

SEQ ID NO: 7542 - protein, 15 aa, Oratosquilla oratoria
EANNRAEKAEEEVHN

SEQ ID NO: 7543 - protein, 15 aa, Oratosquilla oratoria
LEQQNKEANNRAEKA

SEQ ID NO: 7544 - protein, 15 aa, Oratosquilla oratoria
TLEQQNKEANNRAEK

SEQ ID NO: 7545 - protein, 15 aa, Oratosquilla oratoria
NNRAEKAEEEVHNLQ

SEQ ID NO: 7546 - protein, 15 aa, Oratosquilla oratoria
KRMQQLENDLDQVQE

SEQ ID NO: 7547 - protein, 15 aa, Oratosquilla oratoria
AEKAEEEVHNLQKRM

SEQ ID NO: 7548 - protein, 15 aa, Oratosquilla oratoria
EEVHNLQKRMQQLEN

SEQ ID NO: 7549 - protein, 15 aa, Oratosquilla oratoria
RAEKAEEEVHNLQKR

SEQ ID NO: 7550 - protein, 15 aa, Oratosquilla oratoria
LKANTQLEEKDKALQ

SEQ ID NO: 7551 - protein, 15 aa, Oratosquilla oratoria
QLLKANTQLEEKDKA

SEQ ID NO: 7552 - protein, 15 aa, Oratosquilla oratoria
MQQLENDLDQVQEQL

SEQ ID NO: 7553 - protein, 15 aa, Oratosquilla oratoria
LEEKDKALQNAEGEV

SEQ ID NO: 7554 - protein, 15 aa, Oratosquilla oratoria
ENDLDQVQEQLLKAN

SEQ ID NO: 7555 - protein, 15 aa, Oratosquilla oratoria
HNLQKRMQQLENDLD

SEQ ID NO: 7556 - protein, 15 aa, Oratosquilla oratoria
EEEVHNLQKRMQQLE

SEQ ID NO: 7557 - protein, 15 aa, Oratosquilla oratoria
DLDQVQEQLLKANTQ

SEQ ID NO: 7558 - protein, 15 aa, Oratosquilla oratoria
TQLEEKDKALQNAEG

SEQ ID NO: 7559 - protein, 15 aa, Oratosquilla oratoria
NTQLEEKDKALQNAE

SEQ ID NO: 7560 - protein, 15 aa, Oratosquilla oratoria
LLKANTQLEEKDKAL

SEQ ID NO: 7561 - protein, 15 aa, Oratosquilla oratoria
QVQEQLLKANTQLEE

SEQ ID NO: 7562 - protein, 15 aa, Oratosquilla oratoria
EKAEEEVHNLQKRMQ

SEQ ID NO: 7563 - protein, 15 aa, Oratosquilla oratoria
RMQQLENDLDQVQEQ

SEQ ID NO: 7564 - protein, 15 aa, Oratosquilla oratoria
LTNKLKAAEARAEFA

SEQ ID NO: 7565 - protein, 15 aa, Oratosquilla oratoria
TNKLKAAEARAEFAE

SEQ ID NO: 7566 - protein, 15 aa, Oratosquilla oratoria
NRAEKAEEEVHNLQK

SEQ ID NO: 7567 - protein, 15 aa, Oratosquilla oratoria
EQLLKANTQLEEKDK

SEQ ID NO: 7568 - protein, 15 aa, Oratosquilla oratoria
VQEQLLKANTQLEEK

SEQ ID NO: 7569 - protein, 15 aa, Oratosquilla oratoria
QEQLLKANTQLEEKD

SEQ ID NO: 7570 - protein, 15 aa, Oratosquilla oratoria
AEEEVHNLQKRMQQL

SEQ ID NO: 7571 - protein, 15 aa, Pandalus borealis
VQKLQKEVDRLEDEL

SEQ ID NO: 7572 - protein, 15 aa, Pandalus borealis
EADRKYDEVARKLAM

SEQ ID NO: 7573 - protein, 15 aa, Pandalus borealis
AEEADRKYDEVARKL

SEQ ID NO: 7574 - protein, 15 aa, Pandalus borealis
LQKEVDRLEDELVNE

SEQ ID NO: 7575 - protein, 15 aa, Pandalus borealis
SVQKLQKEVDRLEDE

SEQ ID NO: 7576 - protein, 15 aa, Pandalus borealis
QKLQKEVDRLEDELV

SEQ ID NO: 7577 - protein, 15 aa, Pandalus borealis
EVDRLEDELVNEKEK

SEQ ID NO: 7578 - protein, 15 aa, Pandalus borealis
RSVQKLQKEVDRLED

SEQ ID NO: 7579 - protein, 15 aa, Pandalus borealis
EEADRKYDEVARKLA

SEQ ID NO: 7580 - protein, 15 aa, Pandalus borealis
KLQKEVDRLEDELVN

SEQ ID NO: 7581 - protein, 15 aa, Pandalus borealis
EEAYKEQIKTLTNKL

SEQ ID NO: 7582 - protein, 15 aa, Pandalus borealis
ADESERMRKVLENRS

SEQ ID NO: 7583 - protein, 15 aa, Pandalus borealis
QKEVDRLEDELVNEK

SEQ ID NO: 7584 - protein, 15 aa, Pandalus borealis
ADRKYDEVARKLAMV

SEQ ID NO: 7585 - protein, 15 aa, Pandalus borealis
DRKYDEVARKLAMVE

SEQ ID NO: 7586 - protein, 15 aa, Pandalus borealis
DELVNEKEKYKSITD

SEQ ID NO: 7587 - protein, 15 aa, Pandalus borealis
LEDELVNEKEKYKSI

SEQ ID NO: 7588 - protein, 15 aa, Pandalus borealis
VDRLEDELVNEKEKY

SEQ ID NO: 7589 - protein, 15 aa, Pandalus borealis
KEVDRLEDELVNEKE

SEQ ID NO: 7590 - protein, 15 aa, Pandalus borealis
DRLEDELVNEKEKYK

SEQ ID NO: 7591 - protein, 15 aa, Pandalus borealis
ERSVQKLQKEVDRLE

SEQ ID NO: 7592 - protein, 15 aa, Pandalus borealis
DAIKKKMQAMKLEKD

SEQ ID NO: 7593 - protein, 15 aa, Pandalus borealis
EDELVNEKEKYKSIT

SEQ ID NO: 7594 - protein, 15 aa, Pandalus borealis
RLEDELVNEKEKYKS

SEQ ID NO: 7595 - protein, 15 aa, Pandalus borealis
DESERMRKVLENRSL

SEQ ID NO: 7596 - protein, 15 aa, Pandalus borealis
LAEASQAADESERMR

SEQ ID NO: 7597 - protein, 15 aa, Pandalus borealis
LEEDLERSEERLNTA

SEQ ID NO: 7598 - protein, 15 aa, Pandalus borealis
LVNEKEKYKSITDEL

SEQ ID NO: 7599 - protein, 15 aa, Pandalus borealis
QAADESERMRKVLEN

SEQ ID NO: 7600 - protein, 15 aa, Pandalus borealis
AIKKKMQAMKLEKDN

SEQ ID NO: 7601 - protein, 15 aa, Pandalus borealis
ASQAADESERMRKVL

SEQ ID NO: 7602 - protein, 15 aa, Pandalus borealis
AETGESKIVELEEEL

SEQ ID NO: 7603 - protein, 15 aa, Pandalus borealis
IKKKMQAMKLEKDNA

SEQ ID NO: 7604 - protein, 15 aa, Pandalus borealis
SQAADESERMRKVLE

SEQ ID NO: 7605 - protein, 15 aa, Pandalus borealis
EKEKYKSITDELDQT

SEQ ID NO: 7606 - protein, 15 aa, Pandalus borealis
VELEEELRVVGNNLK

SEQ ID NO: 7607 - protein, 15 aa, Pandalus borealis
AEASQAADESERMRK

SEQ ID NO: 7608 - protein, 15 aa, Pandalus borealis
FAERSVQKLQKEVDR

SEQ ID NO: 7609 - protein, 15 aa, Pandalus borealis
VAALNRRIQLLEEDL

SEQ ID NO: 7610 - protein, 15 aa, Pandalus borealis
KEKYKSITDELDQTF

SEQ ID NO: 7611 - protein, 15 aa, Pandalus borealis
QLLEEDLERSEERLN

SEQ ID NO: 7612 - protein, 15 aa, Pandalus borealis
IVELEEELRVVGNNL

SEQ ID NO: 7613 - protein, 15 aa, Pandalus borealis
KIVELEEELRVVGNN

SEQ ID NO: 7614 - protein, 15 aa, Pandalus borealis
EFAERSVQKLQKEVD

SEQ ID NO: 7615 - protein, 15 aa, Pandalus borealis
KSITDELDQTFSELS

SEQ ID NO: 7616 - protein, 15 aa, Pandalus borealis
AERSVQKLQKEVDRL

SEQ ID NO: 7617 - protein, 15 aa, Pandalus borealis
EKYKSITDELDQTFS

SEQ ID NO: 7618 - protein, 15 aa, Pandalus borealis
YKSITDELDQTFSEL

SEQ ID NO: 7619 - protein, 15 aa, Pandalus borealis
KYKSITDELDQTFSE

SEQ ID NO: 7620 - protein, 15 aa, Pandalus borealis
LEEELRVVGNNLKSL

SEQ ID NO: 7621 - protein, 15 aa, Pandalus borealis
AALNRRIQLLEEDLE

SEQ ID NO: 7622 - protein, 15 aa, Pandalus borealis
ESERMRKVLENRSLS

SEQ ID NO: 7623 - protein, 15 aa, Pandalus borealis
LNRRIQLLEEDLERS

SEQ ID NO: 7624 - protein, 15 aa, Pandalus borealis
AADESERMRKVLENR

SEQ ID NO: 7625 - protein, 15 aa, Pandalus borealis
ETGESKIVELEEELR

SEQ ID NO: 7626 - protein, 15 aa, Pandalus borealis
EELRVVGNNLKSLEV

SEQ ID NO: 7627 - protein, 15 aa, Pandalus borealis
KKKMQAMKLEKDNAM

SEQ ID NO: 7628 - protein, 15 aa, Pandalus borealis
ALNRRIQLLEEDLER

SEQ ID NO: 7629 - protein, 15 aa, Pandalus borealis
ESKIVELEEELRVVG

SEQ ID NO: 7630 - protein, 15 aa, Pandalus borealis
LLEEDLERSEERLNT

SEQ ID NO: 7631 - protein, 15 aa, Pandalus borealis
EEELRVVGNNLKSLE

SEQ ID NO: 7632 - protein, 15 aa, Pandalus borealis
FLAEEADRKYDEVAR

SEQ ID NO: 7633 - protein, 15 aa, Pandalus borealis
RIQLLEEDLERSEER

SEQ ID NO: 7634 - protein, 15 aa, Pandalus borealis
SKIVELEEELRVVGN

SEQ ID NO: 7635 - protein, 15 aa, Pandalus borealis
IQLLEEDLERSEERL

SEQ ID NO: 7636 - protein, 15 aa, Pandalus borealis
LKEARFLAEEADRKY

SEQ ID NO: 7637 - protein, 15 aa, Pandalus borealis
ELEEELRVVGNNLKS

SEQ ID NO: 7638 - protein, 15 aa, Pandalus borealis
RVVGNNLKSLEVSEE

SEQ ID NO: 7639 - protein, 15 aa, Pandalus borealis
KLAEASQAADESERM

SEQ ID NO: 7640 - protein, 15 aa, Pandalus borealis
NEKEKYKSITDELDQ

SEQ ID NO: 7641 - protein, 15 aa, Pandalus borealis
NRRIQLLEEDLERSE

SEQ ID NO: 7642 - protein, 15 aa, Pandalus borealis
KLEKDNAMDRADTLE

SEQ ID NO: 7643 - protein, 15 aa, Pandalus borealis
DLERSEERLNTATTK

SEQ ID NO: 7644 - protein, 15 aa, Pandalus borealis
EGEVAALNRRIQLLE

SEQ ID NO: 7645 - protein, 15 aa, Pandalus borealis
EDLERSEERLNTATT

SEQ ID NO: 7646 - protein, 15 aa, Pandalus borealis
DEVARKLAMVEADLE

SEQ ID NO: 7647 - protein, 15 aa, Pandalus borealis
VSEEKANQREEAYKE

SEQ ID NO: 7648 - protein, 15 aa, Pandalus borealis
LERSEERLNTATTKL

SEQ ID NO: 7649 - protein, 15 aa, Pandalus borealis
AEGEVAALNRRIQLL

SEQ ID NO: 7650 - protein, 15 aa, Pandalus borealis
LERAEERAETGESKI

SEQ ID NO: 7651 - protein, 15 aa, Pandalus borealis
SERMRKVLENRSLSD

SEQ ID NO: 7652 - protein, 15 aa, Pandalus borealis
KKMQAMKLEKDNAMD

SEQ ID NO: 7653 - protein, 15 aa, Pandalus borealis
DLERAEERAETGESK

SEQ ID NO: 7654 - protein, 15 aa, Pandalus borealis
KMQAMKLEKDNAMDR

SEQ ID NO: 7655 - protein, 15 aa, Pandalus borealis
LAEEADRKYDEVARK

SEQ ID NO: 7656 - protein, 15 aa, Pandalus borealis
AMVEADLERAEERAE

SEQ ID NO: 7657 - protein, 11 aa, Pandalus borealis
LDQTFSELSGY

SEQ ID NO: 7658 - protein, 15 aa, Pandalus borealis
ERAEERAETGESKIV

SEQ ID NO: 7659 - protein, 15 aa, Pandalus borealis
YDEVARKLAMVEADL

SEQ ID NO: 7660 - protein, 15 aa, Pandalus borealis
AMKLEKDNAMDRADT

SEQ ID NO: 7661 - protein, 15 aa, Pandalus borealis
EASQAADESERMRKV

SEQ ID NO: 7662 - protein, 15 aa, Pandalus borealis
ERAETGESKIVELEE

SEQ ID NO: 7663 - protein, 15 aa, Pandalus borealis
EVAALNRRIQLLEED

SEQ ID NO: 7664 - protein, 15 aa, Pandalus borealis
TGESKIVELEEELRV

SEQ ID NO: 7665 - protein, 15 aa, Pandalus borealis
QAMKLEKDNAMDRAD

SEQ ID NO: 7666 - protein, 15 aa, Pandalus borealis
MQAMKLEKDNAMDRA

SEQ ID NO: 7667 - protein, 15 aa, Pandalus borealis
RRIQLLEEDLERSEE

SEQ ID NO: 7668 - protein, 15 aa, Pandalus borealis
MKLEKDNAMDRADTL

SEQ ID NO: 7669 - protein, 15 aa, Pandalus borealis
RAEERAETGESKIVE

SEQ ID NO: 7670 - protein, 15 aa, Pandalus borealis
LKSLEVSEEKANQRE

SEQ ID NO: 7671 - protein, 15 aa, Pandalus borealis
RSEERLNTATTKLAE

SEQ ID NO: 7672 - protein, 15 aa, Pandalus borealis
RADTLEQQNKEANNR

SEQ ID NO: 7673 - protein, 15 aa, Pandalus borealis
KALSNAEGEVAALNR

SEQ ID NO: 7674 - protein, 15 aa, Pandalus borealis
DEERMDALENQLKEA

SEQ ID NO: 7675 - protein, 15 aa, Pandalus borealis
GESKIVELEEELRVV

SEQ ID NO: 7676 - protein, 15 aa, Pandalus borealis
EERAETGESKIVELE

SEQ ID NO: 7677 - protein, 15 aa, Pandalus borealis
QLKEARFLAEEADRK

SEQ ID NO: 7678 - protein, 15 aa, Pandalus borealis
ERSEERLNTATTKLA

SEQ ID NO: 7679 - protein, 15 aa, Pandalus borealis
LNTATTKLAEASQAA

SEQ ID NO: 7680 - protein, 15 aa, Pandalus borealis
EEDLERSEERLNTAT

SEQ ID NO: 7681 - protein, 15 aa, Pandalus borealis
MDALENQLKEARFLA

SEQ ID NO: 7682 - protein, 14 aa, Pandalus borealis
TDELDQTFSELSGY

SEQ ID NO: 7683 - protein, 15 aa, Pandalus borealis
RLNTATTKLAEASQA

SEQ ID NO: 7684 - protein, 15 aa, Pandalus borealis
SNAEGEVAALNRRIQ

SEQ ID NO: 7685 - protein, 15 aa, Pandalus borealis
SLEVSEEKANQREEA

SEQ ID NO: 7686 - protein, 15 aa, Pandalus borealis
AEARAEFAERSVQKL

SEQ ID NO: 7687 - protein, 15 aa, Pandalus borealis
VGNNLKSLEVSEEKA

SEQ ID NO: 7688 - protein, 15 aa, Pandalus borealis
EARAEFAERSVQKLQ

SEQ ID NO: 7689 - protein, 15 aa, Pandalus borealis
VVGNNLKSLEVSEEK

SEQ ID NO: 7690 - protein, 15 aa, Pandalus borealis
TTKLAEASQAADESE

SEQ ID NO: 7691 - protein, 15 aa, Pandalus borealis
LEVSEEKANQREEAY

SEQ ID NO: 7692 - protein, 15 aa, Pandalus borealis
KSLEVSEEKANQREE

SEQ ID NO: 7693 - protein, 15 aa, Pandalus borealis
LRVVGNNLKSLEVSE

SEQ ID NO: 7694 - protein, 15 aa, Pandalus borealis
NLKSLEVSEEKANQR

SEQ ID NO: 7695 - protein, 15 aa, Pandalus borealis
ARFLAEEADRKYDEV

SEQ ID NO: 7696 - protein, 15 aa, Pandalus borealis
GNNLKSLEVSEEKAN

SEQ ID NO: 7697 - protein, 15 aa, Pandalus borealis
AEFAERSVQKLQKEV

SEQ ID NO: 7698 - protein, 15 aa, Pandalus borealis
ELRVVGNNLKSLEVS

SEQ ID NO: 7699 - protein, 15 aa, Pandalus borealis
DKALSNAEGEVAALN

SEQ ID NO: 7700 - protein, 15 aa, Pandalus borealis
NNLKSLEVSEEKANQ

SEQ ID NO: 7701 - protein, 15 aa, Pandalus borealis
RAEFAERSVQKLQKE

SEQ ID NO: 7702 - protein, 15 aa, Pandalus borealis
EKDNAMDRADTLEQQ

SEQ ID NO: 7703 - protein, 15 aa, Pandalus borealis
EVSEEKANQREEAYK

SEQ ID NO: 7704 - protein, 15 aa, Pandalus borealis
RKYDEVARKLAMVEA

SEQ ID NO: 7705 - protein, 15 aa, Pandalus borealis
RKLAMVEADLERAEE

SEQ ID NO: 7706 - protein, 15 aa, Pandalus borealis
KLAMVEADLERAEER

SEQ ID NO: 7707 - protein, 15 aa, Pandalus borealis
KYDEVARKLAMVEAD

SEQ ID NO: 7708 - protein, 15 aa, Pandalus borealis
KEARFLAEEADRKYD

SEQ ID NO: 7709 - protein, 15 aa, Pandalus borealis
MVEADLERAEERAET

SEQ ID NO: 7710 - protein, 15 aa, Pandalus borealis
REEAYKEQIKTLTNK

SEQ ID NO: 7711 - protein, 15 aa, Pandalus borealis
EVARKLAMVEADLER

SEQ ID NO: 7712 - protein, 15 aa, Pandalus borealis
VARKLAMVEADLERA

SEQ ID NO: 7713 - protein, 15 aa, Pandalus borealis
EADLERAEERAETGE

SEQ ID NO: 7714 - protein, 15 aa, Pandalus borealis
RAETGESKIVELEEE

SEQ ID NO: 7715 - protein, 15 aa, Pandalus borealis
GEVAALNRRIQLLEE

SEQ ID NO: 7716 - protein, 15 aa, Pandalus borealis
NAEGEVAALNRRIQL

SEQ ID NO: 7717 - protein, 15 aa, Pandalus borealis
VEADLERAEERAETG

SEQ ID NO: 7718 - protein, 15 aa, Pandalus borealis
ARKLAMVEADLERAE

SEQ ID NO: 7719 - protein, 15 aa, Pandalus borealis
LAMVEADLERAEERA

SEQ ID NO: 7720 - protein, 15 aa, Pandalus borealis
ADLERAEERAETGES

SEQ ID NO: 7721 - protein, 15 aa, Pandalus borealis
EARFLAEEADRKYDE

SEQ ID NO: 7722 - protein, 15 aa, Pandalus borealis
ARAEFAERSVQKLQK

SEQ ID NO: 7723 - protein, 15 aa, Pandalus borealis
LSNAEGEVAALNRRI

SEQ ID NO: 7724 - protein, 15 aa, Pandalus borealis
RMDALENQLKEARFL

SEQ ID NO: 7725 - protein, 15 aa, Pandalus borealis
ERMDALENQLKEARF

SEQ ID NO: 7726 - protein, 15 aa, Pandalus borealis
SEEKANQREEAYKEQ

SEQ ID NO: 7727 - protein, 15 aa, Pandalus borealis
AEERAETGESKIVEL

SEQ ID NO: 7728 - protein, 15 aa, Pandalus borealis
LENQLKEARFLAEEA

SEQ ID NO: 7729 - protein, 15 aa, Pandalus borealis
KANQREEAYKEQIKT

SEQ ID NO: 7730 - protein, 15 aa, Pandalus borealis
DALENQLKEARFLAE

SEQ ID NO: 7731 - protein, 15 aa, Pandalus borealis
SDEERMDALENQLKE

SEQ ID NO: 7732 - protein, 15 aa, Pandalus borealis
ALENQLKEARFLAEE

SEQ ID NO: 7733 - protein, 15 aa, Pandalus borealis
EERMDALENQLKEAR

SEQ ID NO: 7734 - protein, 15 aa, Pandalus borealis
ATTKLAEASQAADES

SEQ ID NO: 7735 - protein, 15 aa, Pandalus borealis
ENRSLSDEERMDALE

SEQ ID NO: 7736 - protein, 15 aa, Pandalus borealis
VLENRSLSDEERMDA

SEQ ID NO: 7737 - protein, 15 aa, Pandalus borealis
LENRSLSDEERMDAL

SEQ ID NO: 7738 - protein, 15 aa, Pandalus borealis
TKLAEASQAADESER

SEQ ID NO: 7739 - protein, 15 aa, Pandalus borealis
NTATTKLAEASQAAD

SEQ ID NO: 7740 - protein, 15 aa, Pandalus borealis
ENQLKEARFLAEEAD

SEQ ID NO: 7741 - protein, 15 aa, Pandalus borealis
ELVNEKEKYKSITDE

SEQ ID NO: 7742 - protein, 15 aa, Pandalus borealis
NNRAEKSEEEVFGLQ

SEQ ID NO: 7743 - protein, 15 aa, Pandalus borealis
RKVLENRSLSDEERM

SEQ ID NO: 7744 - protein, 15 aa, Pandalus borealis
ERLNTATTKLAEASQ

SEQ ID NO: 7745 - protein, 15 aa, Pandalus borealis
NQLKEARFLAEEADR

SEQ ID NO: 7746 - protein, 15 aa, Pandalus borealis
NQREEAYKEQIKTLT

SEQ ID NO: 7747 - protein, 15 aa, Pandalus borealis
RSLSDEERMDALENQ

SEQ ID NO: 7748 - protein, 15 aa, Pandalus borealis
KKLQQLENDLDSVQE

SEQ ID NO: 7749 - protein, 15 aa, Pandalus borealis
RFLAEEADRKYDEVA

SEQ ID NO: 7750 - protein, 15 aa, Pandalus borealis
ALSNAEGEVAALNRR

SEQ ID NO: 7751 - protein, 15 aa, Pandalus borealis
KVLENRSLSDEERMD

SEQ ID NO: 7752 - protein, 15 aa, Pandalus borealis
ITDELDQTFSELSGY

SEQ ID NO: 7753 - protein, 15 aa, Pandalus borealis
KDKALSNAEGEVAAL

SEQ ID NO: 7754 - protein, 15 aa, Pandalus borealis
NRSLSDEERMDALEN

SEQ ID NO: 7755 - protein, 15 aa, Pandalus borealis
LDSVQEALLKANQHL

SEQ ID NO: 7756 - protein, 15 aa, Pandalus borealis
QREEAYKEQIKTLTN

SEQ ID NO: 7757 - protein, 15 aa, Pandalus borealis
LEKDNAMDRADTLEQ

SEQ ID NO: 7758 - protein, 15 aa, Pandalus borealis
EQIKTLTNKLKAAEA

SEQ ID NO: 7759 - protein, 15 aa, Pandalus borealis
EEKDKALSNAEGEVA

SEQ ID NO: 7760 - protein, 15 aa, Pandalus borealis
SITDELDQTFSELSG

SEQ ID NO: 7761 - protein, 15 aa, Pandalus borealis
VNEKEKYKSITDELD

SEQ ID NO: 7762 - protein, 15 aa, Pandalus borealis
ERMRKVLENRSLSDE

SEQ ID NO: 7763 - protein, 15 aa, Pandalus borealis
AYKEQIKTLTNKLKA

SEQ ID NO: 7764 - protein, 15 aa, Pandalus borealis
EEKANQREEAYKEQI

SEQ ID NO: 7765 - protein, 15 aa, Pandalus borealis
EKANQREEAYKEQIK

SEQ ID NO: 7766 - protein, 15 aa, Pandalus borealis
MRKVLENRSLSDEER

SEQ ID NO: 7767 - protein, 15 aa, Pandalus borealis
ANQREEAYKEQIKTL

SEQ ID NO: 7768 - protein, 15 aa, Pandalus borealis
LSDEERMDALENQLK

SEQ ID NO: 7769 - protein, 15 aa, Pandalus borealis
MDRADTLEQQNKEAN

SEQ ID NO: 7770 - protein, 15 aa, Pandalus borealis
EERLNTATTKLAEAS

SEQ ID NO: 7771 - protein, 15 aa, Pandalus borealis
KANQHLEEKDKALSN

SEQ ID NO: 7772 - protein, 15 aa, Pandalus borealis
EAYKEQIKTLTNKLK

SEQ ID NO: 7773 - protein, 15 aa, Pandalus borealis
KEQIKTLTNKLKAAE

SEQ ID NO: 7774 - protein, 15 aa, Pandalus borealis
SEERLNTATTKLAEA

SEQ ID NO: 7775 - protein, 15 aa, Pandalus borealis
SLSDEERMDALENQL

SEQ ID NO: 7776 - protein, 15 aa, Pandalus borealis
ANNRAEKSEEEVFGL

SEQ ID NO: 7777 - protein, 15 aa, Pandalus borealis
LKANQHLEEKDKALS

SEQ ID NO: 7778 - protein, 15 aa, Pandalus borealis
QKKLQQLENDLDSVQ

SEQ ID NO: 7779 - protein, 15 aa, Pandalus borealis
EKDKALSNAEGEVAA

SEQ ID NO: 7780 - protein, 15 aa, Pandalus borealis
NKLKAAEARAEFAER

SEQ ID NO: 7781 - protein, 15 aa, Pandalus borealis
DNAMDRADTLEQQNK

SEQ ID NO: 7782 - protein, 15 aa, Pandalus borealis
LENDLDSVQEALLKA

SEQ ID NO: 7783 - protein, 15 aa, Pandalus borealis
TATTKLAEASQAADE

SEQ ID NO: 7784 - protein, 15 aa, Pandalus borealis
NAMDRADTLEQQNKE

SEQ ID NO: 7785 - protein, 15 aa, Pandalus borealis
YKEQIKTLTNKLKAA

SEQ ID NO: 7786 - protein, 15 aa, Pandalus borealis
KLKAAEARAEFAERS

SEQ ID NO: 7787 - protein, 15 aa, Pandalus borealis
NKEANNRAEKSEEEV

SEQ ID NO: 7788 - protein, 15 aa, Pandalus borealis
AMDRADTLEQQNKEA

SEQ ID NO: 7789 - protein, 15 aa, Pandalus borealis
RMRKVLENRSLSDEE

SEQ ID NO: 7790 - protein, 15 aa, Pandalus borealis
AEKSEEEVFGLQKKL

SEQ ID NO: 7791 - protein, 15 aa, Pandalus borealis
KDNAMDRADTLEQQN

SEQ ID NO: 7792 - protein, 13 aa, Pandalus borealis
DELDQTFSELSGY

SEQ ID NO: 7793 - protein, 15 aa, Pandalus borealis
KEANNRAEKSEEEVF

SEQ ID NO: 7794 - protein, 15 aa, Pandalus borealis
ANQHLEEKDKALSNA

SEQ ID NO: 7795 - protein, 15 aa, Pandalus borealis
ADTLEQQNKEANNRA

SEQ ID NO: 7796 - protein, 15 aa, Pandalus borealis
DRADTLEQQNKEANN

SEQ ID NO: 7797 - protein, 15 aa, Pandalus borealis
NDLDSVQEALLKANQ

SEQ ID NO: 7798 - protein, 15 aa, Pandalus borealis
EQQNKEANNRAEKSE

SEQ ID NO: 7799 - protein, 15 aa, Pandalus borealis
QNKEANNRAEKSEEE

SEQ ID NO: 7800 - protein, 15 aa, Pandalus borealis
DTLEQQNKEANNRAE

SEQ ID NO: 7801 - protein, 15 aa, Pandalus borealis
LEQQNKEANNRAEKS

SEQ ID NO: 7802 - protein, 15 aa, Pandalus borealis
TLEQQNKEANNRAEK

SEQ ID NO: 7803 - protein, 15 aa, Pandalus borealis
QQNKEANNRAEKSEE

SEQ ID NO: 7804 - protein, 15 aa, Pandalus borealis
EANNRAEKSEEEVFG

SEQ ID NO: 7805 - protein, 15 aa, Pandalus borealis
QLENDLDSVQEALLK

SEQ ID NO: 7806 - protein, 15 aa, Pandalus borealis
RAEKSEEEVFGLQKK

SEQ ID NO: 7807 - protein, 15 aa, Pandalus borealis
LQKKLQQLENDLDSV

SEQ ID NO: 7808 - protein, 15 aa, Pandalus borealis
NRAEKSEEEVFGLQK

SEQ ID NO: 7809 - protein, 15 aa, Pandalus borealis
VFGLQKKLQQLENDL

SEQ ID NO: 7810 - protein, 15 aa, Pandalus borealis
LQQLENDLDSVQEAL

SEQ ID NO: 7811 - protein, 15 aa, Pandalus borealis
KLQQLENDLDSVQEA

SEQ ID NO: 7812 - protein, 15 aa, Pandalus borealis
ENDLDSVQEALLKAN

SEQ ID NO: 7813 - protein, 15 aa, Pandalus borealis
VQEALLKANQHLEEK

SEQ ID NO: 7814 - protein, 15 aa, Pandalus borealis
NQHLEEKDKALSNAE

SEQ ID NO: 7815 - protein, 15 aa, Pandalus borealis
QHLEEKDKALSNAEG

SEQ ID NO: 7816 - protein, 15 aa, Pandalus borealis
DLDSVQEALLKANQH

SEQ ID NO: 7817 - protein, 15 aa, Pandalus borealis
LEEKDKALSNAEGEV

SEQ ID NO: 7818 - protein, 15 aa, Pandalus borealis
KTLTNKLKAAEARAE

SEQ ID NO: 7819 - protein, 15 aa, Pandalus borealis
QQLENDLDSVQEALL

SEQ ID NO: 7820 - protein, 15 aa, Pandalus borealis
HLEEKDKALSNAEGE

SEQ ID NO: 7821 - protein, 15 aa, Pandalus borealis
LTNKLKAAEARAEFA

SEQ ID NO: 7822 - protein, 15 aa, Pandalus borealis
TNKLKAAEARAEFAE

SEQ ID NO: 7823 - protein, 15 aa, Pandalus borealis
EALLKANQHLEEKDK

SEQ ID NO: 7824 - protein, 15 aa, Pandalus borealis
IKTLTNKLKAAEARA

SEQ ID NO: 7825 - protein, 15 aa, Pandalus borealis
QIKTLTNKLKAAEAR

SEQ ID NO: 7826 - protein, 15 aa, Pandalus borealis
QEALLKANQHLEEKD

SEQ ID NO: 7827 - protein, 15 aa, Pandalus borealis
TLTNKLKAAEARAEF

SEQ ID NO: 7828 - protein, 15 aa, Pandalus borealis
SVQEALLKANQHLEE

SEQ ID NO: 7829 - protein, 15 aa, Pandalus borealis
FGLQKKLQQLENDLD

SEQ ID NO: 7830 - protein, 15 aa, Pandalus borealis
SEEEVFGLQKKLQQL

SEQ ID NO: 7831 - protein, 15 aa, Pandalus borealis
KSEEEVFGLQKKLQQ

SEQ ID NO: 7832 - protein, 15 aa, Pandalus borealis
DSVQEALLKANQHLE

SEQ ID NO: 7833 - protein, 15 aa, Pandalus borealis
EKSEEEVFGLQKKLQ

SEQ ID NO: 7834 - protein, 15 aa, Pandalus borealis
GLQKKLQQLENDLDS

SEQ ID NO: 7835 - protein, 15 aa, Pandalus borealis
ALLKANQHLEEKDKA

SEQ ID NO: 7836 - protein, 15 aa, Penaeus aztecus
VQKLQKEVDRLEDEL

SEQ ID NO: 7837 - protein, 15 aa, Penaeus aztecus
EADRKYDEVARKLAM

SEQ ID NO: 7838 - protein, 15 aa, Penaeus aztecus
AEEADRKYDEVARKL

SEQ ID NO: 7839 - protein, 15 aa, Penaeus aztecus
LQKEVDRLEDELVNE

SEQ ID NO: 7840 - protein, 15 aa, Penaeus aztecus
SVQKLQKEVDRLEDE

SEQ ID NO: 7841 - protein, 15 aa, Penaeus aztecus
QKLQKEVDRLEDELV

SEQ ID NO: 7842 - protein, 15 aa, Penaeus aztecus
EVDRLEDELVNEKEK

SEQ ID NO: 7843 - protein, 15 aa, Penaeus aztecus
RSVQKLQKEVDRLED

SEQ ID NO: 7844 - protein, 15 aa, Penaeus aztecus
EEADRKYDEVARKLA

SEQ ID NO: 7845 - protein, 15 aa, Penaeus aztecus
KLQKEVDRLEDELVN

SEQ ID NO: 7846 - protein, 15 aa, Penaeus aztecus
EEAYKEQIKTLTNKL

SEQ ID NO: 7847 - protein, 15 aa, Penaeus aztecus
ADESERMRKVLENRS

SEQ ID NO: 7848 - protein, 15 aa, Penaeus aztecus
QKEVDRLEDELVNEK

SEQ ID NO: 7849 - protein, 15 aa, Penaeus aztecus
ADRKYDEVARKLAMV

SEQ ID NO: 7850 - protein, 15 aa, Penaeus aztecus
DRKYDEVARKLAMVE

SEQ ID NO: 7851 - protein, 15 aa, Penaeus aztecus
DELVNEKEKYKSITD

SEQ ID NO: 7852 - protein, 15 aa, Penaeus aztecus
LEDELVNEKEKYKSI

SEQ ID NO: 7853 - protein, 15 aa, Penaeus aztecus
VDRLEDELVNEKEKY

SEQ ID NO: 7854 - protein, 15 aa, Penaeus aztecus
KEVDRLEDELVNEKE

SEQ ID NO: 7855 - protein, 15 aa, Penaeus aztecus
DRLEDELVNEKEKYK

SEQ ID NO: 7856 - protein, 15 aa, Penaeus aztecus
ERSVQKLQKEVDRLE

SEQ ID NO: 7857 - protein, 15 aa, Penaeus aztecus
DAIKKKMQAMKLEKD

SEQ ID NO: 7858 - protein, 15 aa, Penaeus aztecus
EDELVNEKEKYKSIT

SEQ ID NO: 7859 - protein, 15 aa, Penaeus aztecus
RLEDELVNEKEKYKS

SEQ ID NO: 7860 - protein, 15 aa, Penaeus aztecus
DESERMRKVLENRSL

SEQ ID NO: 7861 - protein, 15 aa, Penaeus aztecus
LAEASQAADESERMR

SEQ ID NO: 7862 - protein, 15 aa, Penaeus aztecus
LEEDLERSEERLNTA

SEQ ID NO: 7863 - protein, 15 aa, Penaeus aztecus
LVNEKEKYKSITDEL

SEQ ID NO: 7864 - protein, 15 aa, Penaeus aztecus
QAADESERMRKVLEN

SEQ ID NO: 7865 - protein, 15 aa, Penaeus aztecus
AIKKKMQAMKLEKDN

SEQ ID NO: 7866 - protein, 15 aa, Penaeus aztecus
ASQAADESERMRKVL

SEQ ID NO: 7867 - protein, 15 aa, Penaeus aztecus
AETGESKIVELEEEL

SEQ ID NO: 7868 - protein, 15 aa, Penaeus aztecus
IKKKMQAMKLEKDNA

SEQ ID NO: 7869 - protein, 15 aa, Penaeus aztecus
SQAADESERMRKVLE

SEQ ID NO: 7870 - protein, 15 aa, Penaeus aztecus
EKEKYKSITDELDQT

SEQ ID NO: 7871 - protein, 15 aa, Penaeus aztecus
VELEEELRVVGNNLK

SEQ ID NO: 7872 - protein, 15 aa, Penaeus aztecus
AEASQAADESERMRK

SEQ ID NO: 7873 - protein, 15 aa, Penaeus aztecus
FAERSVQKLQKEVDR

SEQ ID NO: 7874 - protein, 15 aa, Penaeus aztecus
VAALNRRIQLLEEDL

SEQ ID NO: 7875 - protein, 15 aa, Penaeus aztecus
KEKYKSITDELDQTF

SEQ ID NO: 7876 - protein, 15 aa, Penaeus aztecus
QLLEEDLERSEERLN

SEQ ID NO: 7877 - protein, 15 aa, Penaeus aztecus
IVELEEELRVVGNNL

SEQ ID NO: 7878 - protein, 15 aa, Penaeus aztecus
KIVELEEELRVVGNN

SEQ ID NO: 7879 - protein, 15 aa, Penaeus aztecus
EFAERSVQKLQKEVD

SEQ ID NO: 7880 - protein, 15 aa, Penaeus aztecus
KSITDELDQTFSELS

SEQ ID NO: 7881 - protein, 15 aa, Penaeus aztecus
AERSVQKLQKEVDRL

SEQ ID NO: 7882 - protein, 15 aa, Penaeus aztecus
EKYKSITDELDQTFS

SEQ ID NO: 7883 - protein, 15 aa, Penaeus aztecus
YKSITDELDQTFSEL

SEQ ID NO: 7884 - protein, 15 aa, Penaeus aztecus
KYKSITDELDQTFSE

SEQ ID NO: 7885 - protein, 15 aa, Penaeus aztecus
LEEELRVVGNNLKSL

SEQ ID NO: 7886 - protein, 15 aa, Penaeus aztecus
AALNRRIQLLEEDLE

SEQ ID NO: 7887 - protein, 15 aa, Penaeus aztecus
ESERMRKVLENRSLS

SEQ ID NO: 7888 - protein, 15 aa, Penaeus aztecus
LNRRIQLLEEDLERS

SEQ ID NO: 7889 - protein, 15 aa, Penaeus aztecus
AADESERMRKVLENR

SEQ ID NO: 7890 - protein, 15 aa, Penaeus aztecus
ETGESKIVELEEELR

SEQ ID NO: 7891 - protein, 15 aa, Penaeus aztecus
EELRVVGNNLKSLEV

SEQ ID NO: 7892 - protein, 15 aa, Penaeus aztecus
KKKMQAMKLEKDNAM

SEQ ID NO: 7893 - protein, 15 aa, Penaeus aztecus
ALNRRIQLLEEDLER

SEQ ID NO: 7894 - protein, 15 aa, Penaeus aztecus
ESKIVELEEELRVVG

SEQ ID NO: 7895 - protein, 15 aa, Penaeus aztecus
LLEEDLERSEERLNT

SEQ ID NO: 7896 - protein, 15 aa, Penaeus aztecus
EEELRVVGNNLKSLE

SEQ ID NO: 7897 - protein, 15 aa, Penaeus aztecus
FLAEEADRKYDEVAR

SEQ ID NO: 7898 - protein, 15 aa, Penaeus aztecus
RIQLLEEDLERSEER

SEQ ID NO: 7899 - protein, 15 aa, Penaeus aztecus
SKIVELEEELRVVGN

SEQ ID NO: 7900 - protein, 15 aa, Penaeus aztecus
IQLLEEDLERSEERL

SEQ ID NO: 7901 - protein, 15 aa, Penaeus aztecus
LKEARFLAEEADRKY

SEQ ID NO: 7902 - protein, 15 aa, Penaeus aztecus
ELEEELRVVGNNLKS

SEQ ID NO: 7903 - protein, 15 aa, Penaeus aztecus
RVVGNNLKSLEVSEE

SEQ ID NO: 7904 - protein, 15 aa, Penaeus aztecus
KLAEASQAADESERM

SEQ ID NO: 7905 - protein, 15 aa, Penaeus aztecus
NEKEKYKSITDELDQ

SEQ ID NO: 7906 - protein, 15 aa, Penaeus aztecus
NRRIQLLEEDLERSE

SEQ ID NO: 7907 - protein, 15 aa, Penaeus aztecus
KLEKDNAMDRADTLE

SEQ ID NO: 7908 - protein, 15 aa, Penaeus aztecus
DLERSEERLNTATTK

SEQ ID NO: 7909 - protein, 15 aa, Penaeus aztecus
EGEVAALNRRIQLLE

SEQ ID NO: 7910 - protein, 15 aa, Penaeus aztecus
EDLERSEERLNTATT

SEQ ID NO: 7911 - protein, 15 aa, Penaeus aztecus
DEVARKLAMVEADLE

SEQ ID NO: 7912 - protein, 15 aa, Penaeus aztecus
VSEEKANQREEAYKE

SEQ ID NO: 7913 - protein, 15 aa, Penaeus aztecus
LERSEERLNTATTKL

SEQ ID NO: 7914 - protein, 15 aa, Penaeus aztecus
AEGEVAALNRRIQLL

SEQ ID NO: 7915 - protein, 15 aa, Penaeus aztecus
LERAEERAETGESKI

SEQ ID NO: 7916 - protein, 15 aa, Penaeus aztecus
SERMRKVLENRSLSD

SEQ ID NO: 7917 - protein, 15 aa, Penaeus aztecus
KKMQAMKLEKDNAMD

SEQ ID NO: 7918 - protein, 15 aa, Penaeus aztecus
DLERAEERAETGESK

SEQ ID NO: 7919 - protein, 15 aa, Penaeus aztecus
KMQAMKLEKDNAMDR

SEQ ID NO: 7920 - protein, 15 aa, Penaeus aztecus
LAEEADRKYDEVARK

SEQ ID NO: 7921 - protein, 15 aa, Penaeus aztecus
AMVEADLERAEERAE

SEQ ID NO: 7922 - protein, 11 aa, Penaeus aztecus
LDQTFSELSGY

SEQ ID NO: 7923 - protein, 15 aa, Penaeus aztecus
ERAEERAETGESKIV

SEQ ID NO: 7924 - protein, 15 aa, Penaeus aztecus
YDEVARKLAMVEADL

SEQ ID NO: 7925 - protein, 15 aa, Penaeus aztecus
AMKLEKDNAMDRADT

SEQ ID NO: 7926 - protein, 15 aa, Penaeus aztecus
EASQAADESERMRKV

SEQ ID NO: 7927 - protein, 15 aa, Penaeus aztecus
ERAETGESKIVELEE

SEQ ID NO: 7928 - protein, 15 aa, Penaeus aztecus
EVAALNRRIQLLEED

SEQ ID NO: 7929 - protein, 15 aa, Penaeus aztecus
TGESKIVELEEELRV

SEQ ID NO: 7930 - protein, 15 aa, Penaeus aztecus
QAMKLEKDNAMDRAD

SEQ ID NO: 7931 - protein, 15 aa, Penaeus aztecus
MQAMKLEKDNAMDRA

SEQ ID NO: 7932 - protein, 15 aa, Penaeus aztecus
RRIQLLEEDLERSEE

SEQ ID NO: 7933 - protein, 15 aa, Penaeus aztecus
MKLEKDNAMDRADTL

SEQ ID NO: 7934 - protein, 15 aa, Penaeus aztecus
RAEERAETGESKIVE

SEQ ID NO: 7935 - protein, 15 aa, Penaeus aztecus
GESKIVELEEELRVV

SEQ ID NO: 7936 - protein, 15 aa, Penaeus aztecus
LKSLEVSEEKANQRE

SEQ ID NO: 7937 - protein, 15 aa, Penaeus aztecus
RSEERLNTATTKLAE

SEQ ID NO: 7938 - protein, 15 aa, Penaeus aztecus
RADTLEQQNKEANNR

SEQ ID NO: 7939 - protein, 15 aa, Penaeus aztecus
KALSNAEGEVAALNR

SEQ ID NO: 7940 - protein, 15 aa, Penaeus aztecus
DEERMDALENQLKEA

SEQ ID NO: 7941 - protein, 15 aa, Penaeus aztecus
EERAETGESKIVELE

SEQ ID NO: 7942 - protein, 15 aa, Penaeus aztecus
QLKEARFLAEEADRK

SEQ ID NO: 7943 - protein, 15 aa, Penaeus aztecus
ERSEERLNTATTKLA

SEQ ID NO: 7944 - protein, 15 aa, Penaeus aztecus
LNTATTKLAEASQAA

SEQ ID NO: 7945 - protein, 15 aa, Penaeus aztecus
EEDLERSEERLNTAT

SEQ ID NO: 7946 - protein, 15 aa, Penaeus aztecus
MDALENQLKEARFLA

SEQ ID NO: 7947 - protein, 14 aa, Penaeus aztecus
TDELDQTFSELSGY

SEQ ID NO: 7948 - protein, 15 aa, Penaeus aztecus
RLNTATTKLAEASQA

SEQ ID NO: 7949 - protein, 15 aa, Penaeus aztecus
SNAEGEVAALNRRIQ

SEQ ID NO: 7950 - protein, 15 aa, Penaeus aztecus
SLEVSEEKANQREEA

SEQ ID NO: 7951 - protein, 15 aa, Penaeus aztecus
AEARAEFAERSVQKL

SEQ ID NO: 7952 - protein, 15 aa, Penaeus aztecus
VGNNLKSLEVSEEKA

SEQ ID NO: 7953 - protein, 15 aa, Penaeus aztecus
EARAEFAERSVQKLQ

SEQ ID NO: 7954 - protein, 15 aa, Penaeus aztecus
VVGNNLKSLEVSEEK

SEQ ID NO: 7955 - protein, 15 aa, Penaeus aztecus
TTKLAEASQAADESE

SEQ ID NO: 7956 - protein, 15 aa, Penaeus aztecus
LEVSEEKANQREEAY

SEQ ID NO: 7957 - protein, 15 aa, Penaeus aztecus
KSLEVSEEKANQREE

SEQ ID NO: 7958 - protein, 15 aa, Penaeus aztecus
LRVVGNNLKSLEVSE

SEQ ID NO: 7959 - protein, 15 aa, Penaeus aztecus
NLKSLEVSEEKANQR

SEQ ID NO: 7960 - protein, 15 aa, Penaeus aztecus
ARFLAEEADRKYDEV

SEQ ID NO: 7961 - protein, 15 aa, Penaeus aztecus
GNNLKSLEVSEEKAN

SEQ ID NO: 7962 - protein, 15 aa, Penaeus aztecus
AEFAERSVQKLQKEV

SEQ ID NO: 7963 - protein, 15 aa, Penaeus aztecus
ELRVVGNNLKSLEVS

SEQ ID NO: 7964 - protein, 15 aa, Penaeus aztecus
DKALSNAEGEVAALN

SEQ ID NO: 7965 - protein, 15 aa, Penaeus aztecus
NNLKSLEVSEEKANQ

SEQ ID NO: 7966 - protein, 15 aa, Penaeus aztecus
RAEFAERSVQKLQKE

SEQ ID NO: 7967 - protein, 15 aa, Penaeus aztecus
EKDNAMDRADTLEQQ

SEQ ID NO: 7968 - protein, 15 aa, Penaeus aztecus
EVSEEKANQREEAYK

SEQ ID NO: 7969 - protein, 15 aa, Penaeus aztecus
RKYDEVARKLAMVEA

SEQ ID NO: 7970 - protein, 15 aa, Penaeus aztecus
RKLAMVEADLERAEE

SEQ ID NO: 7971 - protein, 15 aa, Penaeus aztecus
KLAMVEADLERAEER

SEQ ID NO: 7972 - protein, 15 aa, Penaeus aztecus
KYDEVARKLAMVEAD

SEQ ID NO: 7973 - protein, 15 aa, Penaeus aztecus
KEARFLAEEADRKYD

SEQ ID NO: 7974 - protein, 15 aa, Penaeus aztecus
MVEADLERAEERAET

SEQ ID NO: 7975 - protein, 15 aa, Penaeus aztecus
REEAYKEQIKTLTNK

SEQ ID NO: 7976 - protein, 15 aa, Penaeus aztecus
EVARKLAMVEADLER

SEQ ID NO: 7977 - protein, 15 aa, Penaeus aztecus
VARKLAMVEADLERA

SEQ ID NO: 7978 - protein, 15 aa, Penaeus aztecus
EADLERAEERAETGE

SEQ ID NO: 7979 - protein, 15 aa, Penaeus aztecus
RAETGESKIVELEEE

SEQ ID NO: 7980 - protein, 15 aa, Penaeus aztecus
GEVAALNRRIQLLEE

SEQ ID NO: 7981 - protein, 15 aa, Penaeus aztecus
NAEGEVAALNRRIQL

SEQ ID NO: 7982 - protein, 15 aa, Penaeus aztecus
VEADLERAEERAETG

SEQ ID NO: 7983 - protein, 15 aa, Penaeus aztecus
ARKLAMVEADLERAE

SEQ ID NO: 7984 - protein, 15 aa, Penaeus aztecus
LAMVEADLERAEERA

SEQ ID NO: 7985 - protein, 15 aa, Penaeus aztecus
ADLERAEERAETGES

SEQ ID NO: 7986 - protein, 15 aa, Penaeus aztecus
EARFLAEEADRKYDE

SEQ ID NO: 7987 - protein, 15 aa, Penaeus aztecus
ARAEFAERSVQKLQK

SEQ ID NO: 7988 - protein, 15 aa, Penaeus aztecus
LSNAEGEVAALNRRI

SEQ ID NO: 7989 - protein, 15 aa, Penaeus aztecus
RMDALENQLKEARFL

SEQ ID NO: 7990 - protein, 15 aa, Penaeus aztecus
ERMDALENQLKEARF

SEQ ID NO: 7991 - protein, 15 aa, Penaeus aztecus
SEEKANQREEAYKEQ

SEQ ID NO: 7992 - protein, 15 aa, Penaeus aztecus
AEERAETGESKIVEL

SEQ ID NO: 7993 - protein, 15 aa, Penaeus aztecus
LENQLKEARFLAEEA

SEQ ID NO: 7994 - protein, 15 aa, Penaeus aztecus
KANQREEAYKEQIKT

SEQ ID NO: 7995 - protein, 15 aa, Penaeus aztecus
DALENQLKEARFLAE

SEQ ID NO: 7996 - protein, 15 aa, Penaeus aztecus
SDEERMDALENQLKE

SEQ ID NO: 7997 - protein, 15 aa, Penaeus aztecus
ALENQLKEARFLAEE

SEQ ID NO: 7998 - protein, 15 aa, Penaeus aztecus
EERMDALENQLKEAR

SEQ ID NO: 7999 - protein, 15 aa, Penaeus aztecus
ATTKLAEASQAADES

SEQ ID NO: 8000 - protein, 15 aa, Penaeus aztecus
ENRSLSDEERMDALE

SEQ ID NO: 8001 - protein, 15 aa, Penaeus aztecus
QQLENDLDQVQESLL

SEQ ID NO: 8002 - protein, 15 aa, Penaeus aztecus
VLENRSLSDEERMDA

SEQ ID NO: 8003 - protein, 15 aa, Penaeus aztecus
LENRSLSDEERMDAL

SEQ ID NO: 8004 - protein, 15 aa, Penaeus aztecus
TKLAEASQAADESER

SEQ ID NO: 8005 - protein, 15 aa, Penaeus aztecus
NTATTKLAEASQAAD

SEQ ID NO: 8006 - protein, 15 aa, Penaeus aztecus
ADTLEQQNKEANNRA

SEQ ID NO: 8007 - protein, 15 aa, Penaeus aztecus
ENQLKEARFLAEEAD

SEQ ID NO: 8008 - protein, 15 aa, Penaeus aztecus
ELVNEKEKYKSITDE

SEQ ID NO: 8009 - protein, 15 aa, Penaeus aztecus
RKVLENRSLSDEERM

SEQ ID NO: 8010 - protein, 15 aa, Penaeus aztecus
ERLNTATTKLAEASQ

SEQ ID NO: 8011 - protein, 15 aa, Penaeus aztecus
NQLKEARFLAEEADR

SEQ ID NO: 8012 - protein, 15 aa, Penaeus aztecus
NQREEAYKEQIKTLT

SEQ ID NO: 8013 - protein, 15 aa, Penaeus aztecus
RSLSDEERMDALENQ

SEQ ID NO: 8014 - protein, 15 aa, Penaeus aztecus
RFLAEEADRKYDEVA

SEQ ID NO: 8015 - protein, 15 aa, Penaeus aztecus
ALSNAEGEVAALNRR

SEQ ID NO: 8016 - protein, 15 aa, Penaeus aztecus
KVLENRSLSDEERMD

SEQ ID NO: 8017 - protein, 15 aa, Penaeus aztecus
ITDELDQTFSELSGY

SEQ ID NO: 8018 - protein, 15 aa, Penaeus aztecus
KDKALSNAEGEVAAL

SEQ ID NO: 8019 - protein, 15 aa, Penaeus aztecus
NRSLSDEERMDALEN

SEQ ID NO: 8020 - protein, 15 aa, Penaeus aztecus
QREEAYKEQIKTLTN

SEQ ID NO: 8021 - protein, 15 aa, Penaeus aztecus
LEKDNAMDRADTLEQ

SEQ ID NO: 8022 - protein, 15 aa, Penaeus aztecus
EQIKTLTNKLKAAEA

SEQ ID NO: 8023 - protein, 15 aa, Penaeus aztecus
SITDELDQTFSELSG

SEQ ID NO: 8024 - protein, 15 aa, Penaeus aztecus
VNEKEKYKSITDELD

SEQ ID NO: 8025 - protein, 15 aa, Penaeus aztecus
ERMRKVLENRSLSDE

SEQ ID NO: 8026 - protein, 15 aa, Penaeus aztecus
AYKEQIKTLTNKLKA

SEQ ID NO: 8027 - protein, 15 aa, Penaeus aztecus
EEKANQREEAYKEQI

SEQ ID NO: 8028 - protein, 15 aa, Penaeus aztecus
EKANQREEAYKEQIK

SEQ ID NO: 8029 - protein, 15 aa, Penaeus aztecus
MRKVLENRSLSDEER

SEQ ID NO: 8030 - protein, 15 aa, Penaeus aztecus
ANQREEAYKEQIKTL

SEQ ID NO: 8031 - protein, 15 aa, Penaeus aztecus
LSDEERMDALENQLK

SEQ ID NO: 8032 - protein, 15 aa, Penaeus aztecus
MDRADTLEQQNKEAN

SEQ ID NO: 8033 - protein, 15 aa, Penaeus aztecus
EERLNTATTKLAEAS

SEQ ID NO: 8034 - protein, 15 aa, Penaeus aztecus
EAYKEQIKTLTNKLK

SEQ ID NO: 8035 - protein, 15 aa, Penaeus aztecus
KEQIKTLTNKLKAAE

SEQ ID NO: 8036 - protein, 15 aa, Penaeus aztecus
SEERLNTATTKLAEA

SEQ ID NO: 8037 - protein, 15 aa, Penaeus aztecus
LENDLDQVQESLLKA

SEQ ID NO: 8038 - protein, 15 aa, Penaeus aztecus
SLSDEERMDALENQL

SEQ ID NO: 8039 - protein, 15 aa, Penaeus aztecus
VHNLQKRMQQLENDL

SEQ ID NO: 8040 - protein, 15 aa, Penaeus aztecus
LQKRMQQLENDLDQV

SEQ ID NO: 8041 - protein, 15 aa, Penaeus aztecus
ANNRAEKSEEEVHNL

SEQ ID NO: 8042 - protein, 15 aa, Penaeus aztecus
EKDKALSNAEGEVAA

SEQ ID NO: 8043 - protein, 15 aa, Penaeus aztecus
NKLKAAEARAEFAER

SEQ ID NO: 8044 - protein, 15 aa, Penaeus aztecus
DNAMDRADTLEQQNK

SEQ ID NO: 8045 - protein, 15 aa, Penaeus aztecus
TATTKLAEASQAADE

SEQ ID NO: 8046 - protein, 15 aa, Penaeus aztecus
VEKDKALSNAEGEVA

SEQ ID NO: 8047 - protein, 15 aa, Penaeus aztecus
KANIQLVEKDKALSN

SEQ ID NO: 8048 - protein, 15 aa, Penaeus aztecus
EVHNLQKRMQQLEND

SEQ ID NO: 8049 - protein, 15 aa, Penaeus aztecus
NAMDRADTLEQQNKE

SEQ ID NO: 8050 - protein, 15 aa, Penaeus aztecus
YKEQIKTLTNKLKAA

SEQ ID NO: 8051 - protein, 15 aa, Penaeus aztecus
LDQVQESLLKANIQL

SEQ ID NO: 8052 - protein, 15 aa, Penaeus aztecus
KLKAAEARAEFAERS

SEQ ID NO: 8053 - protein, 15 aa, Penaeus aztecus
NKEANNRAEKSEEEV

SEQ ID NO: 8054 - protein, 15 aa, Penaeus aztecus
AMDRADTLEQQNKEA

SEQ ID NO: 8055 - protein, 15 aa, Penaeus aztecus
RMRKVLENRSLSDEE

SEQ ID NO: 8056 - protein, 15 aa, Penaeus aztecus
QLENDLDQVQESLLK

SEQ ID NO: 8057 - protein, 15 aa, Penaeus aztecus
NLQKRMQQLENDLDQ

SEQ ID NO: 8058 - protein, 15 aa, Penaeus aztecus
AEKSEEEVHNLQKRM

SEQ ID NO: 8059 - protein, 15 aa, Penaeus aztecus
KEANNRAEKSEEEVH

SEQ ID NO: 8060 - protein, 15 aa, Penaeus aztecus
KDNAMDRADTLEQQN

SEQ ID NO: 8061 - protein, 13 aa, Penaeus aztecus
DELDQTFSELSGY

SEQ ID NO: 8062 - protein, 15 aa, Penaeus aztecus
ANIQLVEKDKALSNA

SEQ ID NO: 8063 - protein, 15 aa, Penaeus aztecus
DRADTLEQQNKEANN

SEQ ID NO: 8064 - protein, 15 aa, Penaeus aztecus
EEEVHNLQKRMQQLE

SEQ ID NO: 8065 - protein, 15 aa, Penaeus aztecus
EQQNKEANNRAEKSE

SEQ ID NO: 8066 - protein, 15 aa, Penaeus aztecus
QNKEANNRAEKSEEE

SEQ ID NO: 8067 - protein, 15 aa, Penaeus aztecus
NDLDQVQESLLKANI

SEQ ID NO: 8068 - protein, 15 aa, Penaeus aztecus
DTLEQQNKEANNRAE

SEQ ID NO: 8069 - protein, 15 aa, Penaeus aztecus
QKRMQQLENDLDQVQ

SEQ ID NO: 8070 - protein, 15 aa, Penaeus aztecus
DQVQESLLKANIQLV

SEQ ID NO: 8071 - protein, 15 aa, Penaeus aztecus
KSEEEVHNLQKRMQQ

SEQ ID NO: 8072 - protein, 15 aa, Penaeus aztecus
LEQQNKEANNRAEKS

SEQ ID NO: 8073 - protein, 15 aa, Penaeus aztecus
TLEQQNKEANNRAEK

SEQ ID NO: 8074 - protein, 15 aa, Penaeus aztecus
QQNKEANNRAEKSEE

SEQ ID NO: 8075 - protein, 15 aa, Penaeus aztecus
NNRAEKSEEEVHNLQ

SEQ ID NO: 8076 - protein, 15 aa, Penaeus aztecus
KRMQQLENDLDQVQE

SEQ ID NO: 8077 - protein, 15 aa, Penaeus aztecus
EANNRAEKSEEEVHN

SEQ ID NO: 8078 - protein, 15 aa, Penaeus aztecus
LVEKDKALSNAEGEV

SEQ ID NO: 8079 - protein, 15 aa, Penaeus aztecus
SLLKANIQLVEKDKA

SEQ ID NO: 8080 - protein, 15 aa, Penaeus aztecus
EEVHNLQKRMQQLEN

SEQ ID NO: 8081 - protein, 15 aa, Penaeus aztecus
RAEKSEEEVHNLQKR

SEQ ID NO: 8082 - protein, 15 aa, Penaeus aztecus
LKANIQLVEKDKALS

SEQ ID NO: 8083 - protein, 15 aa, Penaeus aztecus
ENDLDQVQESLLKAN

SEQ ID NO: 8084 - protein, 15 aa, Penaeus aztecus
MQQLENDLDQVQESL

SEQ ID NO: 8085 - protein, 15 aa, Penaeus aztecus
IQLVEKDKALSNAEG

SEQ ID NO: 8086 - protein, 15 aa, Penaeus aztecus
DLDQVQESLLKANIQ

SEQ ID NO: 8087 - protein, 15 aa, Penaeus aztecus
HNLQKRMQQLENDLD

SEQ ID NO: 8088 - protein, 15 aa, Penaeus aztecus
NIQLVEKDKALSNAE

SEQ ID NO: 8089 - protein, 15 aa, Penaeus aztecus
NRAEKSEEEVHNLQK

SEQ ID NO: 8090 - protein, 15 aa, Penaeus aztecus
KTLTNKLKAAEARAE

SEQ ID NO: 8091 - protein, 15 aa, Penaeus aztecus
QLVEKDKALSNAEGE

SEQ ID NO: 8092 - protein, 15 aa, Penaeus aztecus
QVQESLLKANIQLVE

SEQ ID NO: 8093 - protein, 15 aa, Penaeus aztecus
LTNKLKAAEARAEFA

SEQ ID NO: 8094 - protein, 15 aa, Penaeus aztecus
TNKLKAAEARAEFAE

SEQ ID NO: 8095 - protein, 15 aa, Penaeus aztecus
EKSEEEVHNLQKRMQ

SEQ ID NO: 8096 - protein, 15 aa, Penaeus aztecus
RMQQLENDLDQVQES

SEQ ID NO: 8097 - protein, 15 aa, Penaeus aztecus
LLKANIQLVEKDKAL

SEQ ID NO: 8098 - protein, 15 aa, Penaeus aztecus
VQESLLKANIQLVEK

SEQ ID NO: 8099 - protein, 15 aa, Penaeus aztecus
ESLLKANIQLVEKDK

SEQ ID NO: 8100 - protein, 15 aa, Penaeus aztecus
QESLLKANIQLVEKD

SEQ ID NO: 8101 - protein, 15 aa, Penaeus aztecus
SEEEVHNLQKRMQQL

SEQ ID NO: 8102 - protein, 15 aa, Penaeus aztecus
IKTLTNKLKAAEARA

SEQ ID NO: 8103 - protein, 15 aa, Penaeus aztecus
QIKTLTNKLKAAEAR

SEQ ID NO: 8104 - protein, 15 aa, Penaeus aztecus
TLTNKLKAAEARAEF

SEQ ID NO: 8105 - protein, 15 aa, Penaeus monodon
VQKLQKEVDRLEDEL

SEQ ID NO: 8106 - protein, 15 aa, Penaeus monodon
EADRKYDEVARKLAM

SEQ ID NO: 8107 - protein, 15 aa, Penaeus monodon
AEEADRKYDEVARKL

SEQ ID NO: 8108 - protein, 15 aa, Penaeus monodon
LQKEVDRLEDELVNE

SEQ ID NO: 8109 - protein, 15 aa, Penaeus monodon
SVQKLQKEVDRLEDE

SEQ ID NO: 8110 - protein, 15 aa, Penaeus monodon
QKLQKEVDRLEDELV

SEQ ID NO: 8111 - protein, 15 aa, Penaeus monodon
EVDRLEDELVNEKEK

SEQ ID NO: 8112 - protein, 15 aa, Penaeus monodon
RSVQKLQKEVDRLED

SEQ ID NO: 8113 - protein, 15 aa, Penaeus monodon
EEADRKYDEVARKLA

SEQ ID NO: 8114 - protein, 15 aa, Penaeus monodon
KLQKEVDRLEDELVN

SEQ ID NO: 8115 - protein, 15 aa, Penaeus monodon
EEAYKEQIKTLTNKL

SEQ ID NO: 8116 - protein, 15 aa, Penaeus monodon
ADESERMRKVLENRS

SEQ ID NO: 8117 - protein, 15 aa, Penaeus monodon
QKEVDRLEDELVNEK

SEQ ID NO: 8118 - protein, 15 aa, Penaeus monodon
ADRKYDEVARKLAMV

SEQ ID NO: 8119 - protein, 15 aa, Penaeus monodon
DRKYDEVARKLAMVE

SEQ ID NO: 8120 - protein, 15 aa, Penaeus monodon
DELVNEKEKYKSITD

SEQ ID NO: 8121 - protein, 15 aa, Penaeus monodon
LEDELVNEKEKYKSI

SEQ ID NO: 8122 - protein, 15 aa, Penaeus monodon
VDRLEDELVNEKEKY

SEQ ID NO: 8123 - protein, 15 aa, Penaeus monodon
KEVDRLEDELVNEKE

SEQ ID NO: 8124 - protein, 15 aa, Penaeus monodon
DRLEDELVNEKEKYK

SEQ ID NO: 8125 - protein, 15 aa, Penaeus monodon
ERSVQKLQKEVDRLE

SEQ ID NO: 8126 - protein, 15 aa, Penaeus monodon
DAIKKKMQAMKLEKD

SEQ ID NO: 8127 - protein, 15 aa, Penaeus monodon
EDELVNEKEKYKSIT

SEQ ID NO: 8128 - protein, 15 aa, Penaeus monodon
RLEDELVNEKEKYKS

SEQ ID NO: 8129 - protein, 15 aa, Penaeus monodon
DESERMRKVLENRSL

SEQ ID NO: 8130 - protein, 15 aa, Penaeus monodon
LAEASQAADESERMR

SEQ ID NO: 8131 - protein, 15 aa, Penaeus monodon
LEEDLERSEERLNTA

SEQ ID NO: 8132 - protein, 15 aa, Penaeus monodon
LVNEKEKYKSITDEL

SEQ ID NO: 8133 - protein, 15 aa, Penaeus monodon
QAADESERMRKVLEN

SEQ ID NO: 8134 - protein, 15 aa, Penaeus monodon
AIKKKMQAMKLEKDN

SEQ ID NO: 8135 - protein, 15 aa, Penaeus monodon
ASQAADESERMRKVL

SEQ ID NO: 8136 - protein, 15 aa, Penaeus monodon
AETGESKIVELEEEL

SEQ ID NO: 8137 - protein, 15 aa, Penaeus monodon
IKKKMQAMKLEKDNA

SEQ ID NO: 8138 - protein, 15 aa, Penaeus monodon
SQAADESERMRKVLE

SEQ ID NO: 8139 - protein, 15 aa, Penaeus monodon
EKEKYKSITDELDQT

SEQ ID NO: 8140 - protein, 15 aa, Penaeus monodon
VELEEELRVVGNNLK

SEQ ID NO: 8141 - protein, 15 aa, Penaeus monodon
AEASQAADESERMRK

SEQ ID NO: 8142 - protein, 15 aa, Penaeus monodon
FAERSVQKLQKEVDR

SEQ ID NO: 8143 - protein, 15 aa, Penaeus monodon
VAALNRRIQLLEEDL

SEQ ID NO: 8144 - protein, 15 aa, Penaeus monodon
KEKYKSITDELDQTF

SEQ ID NO: 8145 - protein, 15 aa, Penaeus monodon
QLLEEDLERSEERLN

SEQ ID NO: 8146 - protein, 15 aa, Penaeus monodon
IVELEEELRVVGNNL

SEQ ID NO: 8147 - protein, 15 aa, Penaeus monodon
KIVELEEELRVVGNN

SEQ ID NO: 8148 - protein, 15 aa, Penaeus monodon
EFAERSVQKLQKEVD

SEQ ID NO: 8149 - protein, 15 aa, Penaeus monodon
KSITDELDQTFSELS

SEQ ID NO: 8150 - protein, 15 aa, Penaeus monodon
AERSVQKLQKEVDRL

SEQ ID NO: 8151 - protein, 15 aa, Penaeus monodon
EKYKSITDELDQTFS

SEQ ID NO: 8152 - protein, 15 aa, Penaeus monodon
YKSITDELDQTFSEL

SEQ ID NO: 8153 - protein, 15 aa, Penaeus monodon
KYKSITDELDQTFSE

SEQ ID NO: 8154 - protein, 15 aa, Penaeus monodon
LEEELRVVGNNLKSL

SEQ ID NO: 8155 - protein, 15 aa, Penaeus monodon
AALNRRIQLLEEDLE

SEQ ID NO: 8156 - protein, 15 aa, Penaeus monodon
ESERMRKVLENRSLS

SEQ ID NO: 8157 - protein, 15 aa, Penaeus monodon
LNRRIQLLEEDLERS

SEQ ID NO: 8158 - protein, 15 aa, Penaeus monodon
AADESERMRKVLENR

SEQ ID NO: 8159 - protein, 15 aa, Penaeus monodon
ETGESKIVELEEELR

SEQ ID NO: 8160 - protein, 15 aa, Penaeus monodon
EELRVVGNNLKSLEV

SEQ ID NO: 8161 - protein, 15 aa, Penaeus monodon
KKKMQAMKLEKDNAM

SEQ ID NO: 8162 - protein, 15 aa, Penaeus monodon
ALNRRIQLLEEDLER

SEQ ID NO: 8163 - protein, 15 aa, Penaeus monodon
ESKIVELEEELRVVG

SEQ ID NO: 8164 - protein, 15 aa, Penaeus monodon
LLEEDLERSEERLNT

SEQ ID NO: 8165 - protein, 15 aa, Penaeus monodon
EEELRVVGNNLKSLE

SEQ ID NO: 8166 - protein, 15 aa, Penaeus monodon
FLAEEADRKYDEVAR

SEQ ID NO: 8167 - protein, 15 aa, Penaeus monodon
RIQLLEEDLERSEER

SEQ ID NO: 8168 - protein, 15 aa, Penaeus monodon
SKIVELEEELRVVGN

SEQ ID NO: 8169 - protein, 15 aa, Penaeus monodon
IQLLEEDLERSEERL

SEQ ID NO: 8170 - protein, 15 aa, Penaeus monodon
LKEARFLAEEADRKY

SEQ ID NO: 8171 - protein, 15 aa, Penaeus monodon
ELEEELRVVGNNLKS

SEQ ID NO: 8172 - protein, 15 aa, Penaeus monodon
RVVGNNLKSLEVSEE

SEQ ID NO: 8173 - protein, 15 aa, Penaeus monodon
KLAEASQAADESERM

SEQ ID NO: 8174 - protein, 15 aa, Penaeus monodon
NEKEKYKSITDELDQ

SEQ ID NO: 8175 - protein, 15 aa, Penaeus monodon
NRRIQLLEEDLERSE

SEQ ID NO: 8176 - protein, 15 aa, Penaeus monodon
KLEKDNAMDRADTLE

SEQ ID NO: 8177 - protein, 15 aa, Penaeus monodon
DLERSEERLNTATTK

SEQ ID NO: 8178 - protein, 15 aa, Penaeus monodon
EGEVAALNRRIQLLE

SEQ ID NO: 8179 - protein, 15 aa, Penaeus monodon
EDLERSEERLNTATT

SEQ ID NO: 8180 - protein, 15 aa, Penaeus monodon
DEVARKLAMVEADLE

SEQ ID NO: 8181 - protein, 15 aa, Penaeus monodon
VSEEKANQREEAYKE

SEQ ID NO: 8182 - protein, 15 aa, Penaeus monodon
LERSEERLNTATTKL

SEQ ID NO: 8183 - protein, 15 aa, Penaeus monodon
AEGEVAALNRRIQLL

SEQ ID NO: 8184 - protein, 15 aa, Penaeus monodon
LERAEERAETGESKI

SEQ ID NO: 8185 - protein, 15 aa, Penaeus monodon
SERMRKVLENRSLSD

SEQ ID NO: 8186 - protein, 15 aa, Penaeus monodon
KKMQAMKLEKDNAMD

SEQ ID NO: 8187 - protein, 15 aa, Penaeus monodon
DLERAEERAETGESK

SEQ ID NO: 8188 - protein, 15 aa, Penaeus monodon
KMQAMKLEKDNAMDR

SEQ ID NO: 8189 - protein, 15 aa, Penaeus monodon
LAEEADRKYDEVARK

SEQ ID NO: 8190 - protein, 15 aa, Penaeus monodon
AMVEADLERAEERAE

SEQ ID NO: 8191 - protein, 11 aa, Penaeus monodon
LDQTFSELSGY

SEQ ID NO: 8192 - protein, 15 aa, Penaeus monodon
ERAEERAETGESKIV

SEQ ID NO: 8193 - protein, 15 aa, Penaeus monodon
YDEVARKLAMVEADL

SEQ ID NO: 8194 - protein, 15 aa, Penaeus monodon
AMKLEKDNAMDRADT

SEQ ID NO: 8195 - protein, 15 aa, Penaeus monodon
EASQAADESERMRKV

SEQ ID NO: 8196 - protein, 15 aa, Penaeus monodon
ERAETGESKIVELEE

SEQ ID NO: 8197 - protein, 15 aa, Penaeus monodon
EVAALNRRIQLLEED

SEQ ID NO: 8198 - protein, 15 aa, Penaeus monodon
TGESKIVELEEELRV

SEQ ID NO: 8199 - protein, 15 aa, Penaeus monodon
QAMKLEKDNAMDRAD

SEQ ID NO: 8200 - protein, 15 aa, Penaeus monodon
MQAMKLEKDNAMDRA

SEQ ID NO: 8201 - protein, 15 aa, Penaeus monodon
RRIQLLEEDLERSEE

SEQ ID NO: 8202 - protein, 15 aa, Penaeus monodon
MKLEKDNAMDRADTL

SEQ ID NO: 8203 - protein, 15 aa, Penaeus monodon
RAEERAETGESKIVE

SEQ ID NO: 8204 - protein, 15 aa, Penaeus monodon
GESKIVELEEELRVV

SEQ ID NO: 8205 - protein, 15 aa, Penaeus monodon
LKSLEVSEEKANQRE

SEQ ID NO: 8206 - protein, 15 aa, Penaeus monodon
RSEERLNTATTKLAE

SEQ ID NO: 8207 - protein, 15 aa, Penaeus monodon
RADTLEQQNKEANNR

SEQ ID NO: 8208 - protein, 15 aa, Penaeus monodon
KALSNAEGEVAALNR

SEQ ID NO: 8209 - protein, 15 aa, Penaeus monodon
DEERMDALENQLKEA

SEQ ID NO: 8210 - protein, 15 aa, Penaeus monodon
EERAETGESKIVELE

SEQ ID NO: 8211 - protein, 15 aa, Penaeus monodon
QLKEARFLAEEADRK

SEQ ID NO: 8212 - protein, 15 aa, Penaeus monodon
ERSEERLNTATTKLA

SEQ ID NO: 8213 - protein, 15 aa, Penaeus monodon
LNTATTKLAEASQAA

SEQ ID NO: 8214 - protein, 15 aa, Penaeus monodon
EEDLERSEERLNTAT

SEQ ID NO: 8215 - protein, 15 aa, Penaeus monodon
MDALENQLKEARFLA

SEQ ID NO: 8216 - protein, 14 aa, Penaeus monodon
TDELDQTFSELSGY

SEQ ID NO: 8217 - protein, 15 aa, Penaeus monodon
RLNTATTKLAEASQA

SEQ ID NO: 8218 - protein, 15 aa, Penaeus monodon
SNAEGEVAALNRRIQ

SEQ ID NO: 8219 - protein, 15 aa, Penaeus monodon
SLEVSEEKANQREEA

SEQ ID NO: 8220 - protein, 15 aa, Penaeus monodon
AEARAEFAERSVQKL

SEQ ID NO: 8221 - protein, 15 aa, Penaeus monodon
VGNNLKSLEVSEEKA

SEQ ID NO: 8222 - protein, 15 aa, Penaeus monodon
EARAEFAERSVQKLQ

SEQ ID NO: 8223 - protein, 15 aa, Penaeus monodon
VVGNNLKSLEVSEEK

SEQ ID NO: 8224 - protein, 15 aa, Penaeus monodon
TTKLAEASQAADESE

SEQ ID NO: 8225 - protein, 15 aa, Penaeus monodon
LEVSEEKANQREEAY

SEQ ID NO: 8226 - protein, 15 aa, Penaeus monodon
KSLEVSEEKANQREE

SEQ ID NO: 8227 - protein, 15 aa, Penaeus monodon
LRVVGNNLKSLEVSE

SEQ ID NO: 8228 - protein, 15 aa, Penaeus monodon
NLKSLEVSEEKANQR

SEQ ID NO: 8229 - protein, 15 aa, Penaeus monodon
ARFLAEEADRKYDEV

SEQ ID NO: 8230 - protein, 15 aa, Penaeus monodon
GNNLKSLEVSEEKAN

SEQ ID NO: 8231 - protein, 15 aa, Penaeus monodon
AEFAERSVQKLQKEV

SEQ ID NO: 8232 - protein, 15 aa, Penaeus monodon
ELRVVGNNLKSLEVS

SEQ ID NO: 8233 - protein, 15 aa, Penaeus monodon
DKALSNAEGEVAALN

SEQ ID NO: 8234 - protein, 15 aa, Penaeus monodon
NNLKSLEVSEEKANQ

SEQ ID NO: 8235 - protein, 15 aa, Penaeus monodon
RAEFAERSVQKLQKE

SEQ ID NO: 8236 - protein, 15 aa, Penaeus monodon
EKDNAMDRADTLEQQ

SEQ ID NO: 8237 - protein, 15 aa, Penaeus monodon
EVSEEKANQREEAYK

SEQ ID NO: 8238 - protein, 15 aa, Penaeus monodon
RKYDEVARKLAMVEA

SEQ ID NO: 8239 - protein, 15 aa, Penaeus monodon
RKLAMVEADLERAEE

SEQ ID NO: 8240 - protein, 15 aa, Penaeus monodon
KLAMVEADLERAEER

SEQ ID NO: 8241 - protein, 15 aa, Penaeus monodon
KYDEVARKLAMVEAD

SEQ ID NO: 8242 - protein, 15 aa, Penaeus monodon
KEARFLAEEADRKYD

SEQ ID NO: 8243 - protein, 15 aa, Penaeus monodon
MVEADLERAEERAET

SEQ ID NO: 8244 - protein, 15 aa, Penaeus monodon
REEAYKEQIKTLTNK

SEQ ID NO: 8245 - protein, 15 aa, Penaeus monodon
EVARKLAMVEADLER

SEQ ID NO: 8246 - protein, 15 aa, Penaeus monodon
VARKLAMVEADLERA

SEQ ID NO: 8247 - protein, 15 aa, Penaeus monodon
EADLERAEERAETGE

SEQ ID NO: 8248 - protein, 15 aa, Penaeus monodon
RAETGESKIVELEEE

SEQ ID NO: 8249 - protein, 15 aa, Penaeus monodon
GEVAALNRRIQLLEE

SEQ ID NO: 8250 - protein, 15 aa, Penaeus monodon
NAEGEVAALNRRIQL

SEQ ID NO: 8251 - protein, 15 aa, Penaeus monodon
VEADLERAEERAETG

SEQ ID NO: 8252 - protein, 15 aa, Penaeus monodon
ARKLAMVEADLERAE

SEQ ID NO: 8253 - protein, 15 aa, Penaeus monodon
LAMVEADLERAEERA

SEQ ID NO: 8254 - protein, 15 aa, Penaeus monodon
ADLERAEERAETGES

SEQ ID NO: 8255 - protein, 15 aa, Penaeus monodon
EARFLAEEADRKYDE

SEQ ID NO: 8256 - protein, 15 aa, Penaeus monodon
ARAEFAERSVQKLQK

SEQ ID NO: 8257 - protein, 15 aa, Penaeus monodon
LSNAEGEVAALNRRI

SEQ ID NO: 8258 - protein, 15 aa, Penaeus monodon
RMDALENQLKEARFL

SEQ ID NO: 8259 - protein, 15 aa, Penaeus monodon
ERMDALENQLKEARF

SEQ ID NO: 8260 - protein, 15 aa, Penaeus monodon
SEEKANQREEAYKEQ

SEQ ID NO: 8261 - protein, 15 aa, Penaeus monodon
AEERAETGESKIVEL

SEQ ID NO: 8262 - protein, 15 aa, Penaeus monodon
LENQLKEARFLAEEA

SEQ ID NO: 8263 - protein, 15 aa, Penaeus monodon
KANQREEAYKEQIKT

SEQ ID NO: 8264 - protein, 15 aa, Penaeus monodon
DALENQLKEARFLAE

SEQ ID NO: 8265 - protein, 15 aa, Penaeus monodon
SDEERMDALENQLKE

SEQ ID NO: 8266 - protein, 15 aa, Penaeus monodon
ALENQLKEARFLAEE

SEQ ID NO: 8267 - protein, 15 aa, Penaeus monodon
EERMDALENQLKEAR

SEQ ID NO: 8268 - protein, 15 aa, Penaeus monodon
ATTKLAEASQAADES

SEQ ID NO: 8269 - protein, 15 aa, Penaeus monodon
ENRSLSDEERMDALE

SEQ ID NO: 8270 - protein, 15 aa, Penaeus monodon
QQLENDLDQVQESLL

SEQ ID NO: 8271 - protein, 15 aa, Penaeus monodon
VLENRSLSDEERMDA

SEQ ID NO: 8272 - protein, 15 aa, Penaeus monodon
LENRSLSDEERMDAL

SEQ ID NO: 8273 - protein, 15 aa, Penaeus monodon
TKLAEASQAADESER

SEQ ID NO: 8274 - protein, 15 aa, Penaeus monodon
NTATTKLAEASQAAD

SEQ ID NO: 8275 - protein, 15 aa, Penaeus monodon
ADTLEQQNKEANNRA

SEQ ID NO: 8276 - protein, 15 aa, Penaeus monodon
ENQLKEARFLAEEAD

SEQ ID NO: 8277 - protein, 15 aa, Penaeus monodon
ELVNEKEKYKSITDE

SEQ ID NO: 8278 - protein, 15 aa, Penaeus monodon
RKVLENRSLSDEERM

SEQ ID NO: 8279 - protein, 15 aa, Penaeus monodon
ERLNTATTKLAEASQ

SEQ ID NO: 8280 - protein, 15 aa, Penaeus monodon
NQLKEARFLAEEADR

SEQ ID NO: 8281 - protein, 15 aa, Penaeus monodon
NQREEAYKEQIKTLT

SEQ ID NO: 8282 - protein, 15 aa, Penaeus monodon
RSLSDEERMDALENQ

SEQ ID NO: 8283 - protein, 15 aa, Penaeus monodon
RFLAEEADRKYDEVA

SEQ ID NO: 8284 - protein, 15 aa, Penaeus monodon
ALSNAEGEVAALNRR

SEQ ID NO: 8285 - protein, 15 aa, Penaeus monodon
KVLENRSLSDEERMD

SEQ ID NO: 8286 - protein, 15 aa, Penaeus monodon
ITDELDQTFSELSGY

SEQ ID NO: 8287 - protein, 15 aa, Penaeus monodon
KDKALSNAEGEVAAL

SEQ ID NO: 8288 - protein, 15 aa, Penaeus monodon
NRSLSDEERMDALEN

SEQ ID NO: 8289 - protein, 15 aa, Penaeus monodon
QREEAYKEQIKTLTN

SEQ ID NO: 8290 - protein, 15 aa, Penaeus monodon
LEKDNAMDRADTLEQ

SEQ ID NO: 8291 - protein, 15 aa, Penaeus monodon
EQIKTLTNKLKAAEA

SEQ ID NO: 8292 - protein, 15 aa, Penaeus monodon
SITDELDQTFSELSG

SEQ ID NO: 8293 - protein, 15 aa, Penaeus monodon
VNEKEKYKSITDELD

SEQ ID NO: 8294 - protein, 15 aa, Penaeus monodon
ERMRKVLENRSLSDE

SEQ ID NO: 8295 - protein, 15 aa, Penaeus monodon
AYKEQIKTLTNKLKA

SEQ ID NO: 8296 - protein, 15 aa, Penaeus monodon
EEKANQREEAYKEQI

SEQ ID NO: 8297 - protein, 15 aa, Penaeus monodon
EKANQREEAYKEQIK

SEQ ID NO: 8298 - protein, 15 aa, Penaeus monodon
MRKVLENRSLSDEER

SEQ ID NO: 8299 - protein, 15 aa, Penaeus monodon
ANQREEAYKEQIKTL

SEQ ID NO: 8300 - protein, 15 aa, Penaeus monodon
LSDEERMDALENQLK

SEQ ID NO: 8301 - protein, 15 aa, Penaeus monodon
MDRADTLEQQNKEAN

SEQ ID NO: 8302 - protein, 15 aa, Penaeus monodon
EERLNTATTKLAEAS

SEQ ID NO: 8303 - protein, 15 aa, Penaeus monodon
EAYKEQIKTLTNKLK

SEQ ID NO: 8304 - protein, 15 aa, Penaeus monodon
KEQIKTLTNKLKAAE

SEQ ID NO: 8305 - protein, 15 aa, Penaeus monodon
SEERLNTATTKLAEA

SEQ ID NO: 8306 - protein, 15 aa, Penaeus monodon
LENDLDQVQESLLKA

SEQ ID NO: 8307 - protein, 15 aa, Penaeus monodon
SLSDEERMDALENQL

SEQ ID NO: 8308 - protein, 15 aa, Penaeus monodon
VHNLQKRMQQLENDL

SEQ ID NO: 8309 - protein, 15 aa, Penaeus monodon
LQKRMQQLENDLDQV

SEQ ID NO: 8310 - protein, 15 aa, Penaeus monodon
ANNRAEKSEEEVHNL

SEQ ID NO: 8311 - protein, 15 aa, Penaeus monodon
EKDKALSNAEGEVAA

SEQ ID NO: 8312 - protein, 15 aa, Penaeus monodon
NKLKAAEARAEFAER

SEQ ID NO: 8313 - protein, 15 aa, Penaeus monodon
DNAMDRADTLEQQNK

SEQ ID NO: 8314 - protein, 15 aa, Penaeus monodon
TATTKLAEASQAADE

SEQ ID NO: 8315 - protein, 15 aa, Penaeus monodon
VEKDKALSNAEGEVA

SEQ ID NO: 8316 - protein, 15 aa, Penaeus monodon
KANIQLVEKDKALSN

SEQ ID NO: 8317 - protein, 15 aa, Penaeus monodon
EVHNLQKRMQQLEND

SEQ ID NO: 8318 - protein, 15 aa, Penaeus monodon
NAMDRADTLEQQNKE

SEQ ID NO: 8319 - protein, 15 aa, Penaeus monodon
YKEQIKTLTNKLKAA

SEQ ID NO: 8320 - protein, 15 aa, Penaeus monodon
LDQVQESLLKANIQL

SEQ ID NO: 8321 - protein, 15 aa, Penaeus monodon
KLKAAEARAEFAERS

SEQ ID NO: 8322 - protein, 15 aa, Penaeus monodon
NKEANNRAEKSEEEV

SEQ ID NO: 8323 - protein, 15 aa, Penaeus monodon
AMDRADTLEQQNKEA

SEQ ID NO: 8324 - protein, 15 aa, Penaeus monodon
RMRKVLENRSLSDEE

SEQ ID NO: 8325 - protein, 15 aa, Penaeus monodon
QLENDLDQVQESLLK

SEQ ID NO: 8326 - protein, 15 aa, Penaeus monodon
NLQKRMQQLENDLDQ

SEQ ID NO: 8327 - protein, 15 aa, Penaeus monodon
AEKSEEEVHNLQKRM

SEQ ID NO: 8328 - protein, 15 aa, Penaeus monodon
KEANNRAEKSEEEVH

SEQ ID NO: 8329 - protein, 15 aa, Penaeus monodon
KDNAMDRADTLEQQN

SEQ ID NO: 8330 - protein, 13 aa, Penaeus monodon
DELDQTFSELSGY

SEQ ID NO: 8331 - protein, 15 aa, Penaeus monodon
ANIQLVEKDKALSNA

SEQ ID NO: 8332 - protein, 15 aa, Penaeus monodon
DRADTLEQQNKEANN

SEQ ID NO: 8333 - protein, 15 aa, Penaeus monodon
EEEVHNLQKRMQQLE

SEQ ID NO: 8334 - protein, 15 aa, Penaeus monodon
EQQNKEANNRAEKSE

SEQ ID NO: 8335 - protein, 15 aa, Penaeus monodon
QNKEANNRAEKSEEE

SEQ ID NO: 8336 - protein, 15 aa, Penaeus monodon
NDLDQVQESLLKANI

SEQ ID NO: 8337 - protein, 15 aa, Penaeus monodon
DTLEQQNKEANNRAE

SEQ ID NO: 8338 - protein, 15 aa, Penaeus monodon
QKRMQQLENDLDQVQ

SEQ ID NO: 8339 - protein, 15 aa, Penaeus monodon
DQVQESLLKANIQLV

SEQ ID NO: 8340 - protein, 15 aa, Penaeus monodon
KSEEEVHNLQKRMQQ

SEQ ID NO: 8341 - protein, 15 aa, Penaeus monodon
LEQQNKEANNRAEKS

SEQ ID NO: 8342 - protein, 15 aa, Penaeus monodon
TLEQQNKEANNRAEK

SEQ ID NO: 8343 - protein, 15 aa, Penaeus monodon
QQNKEANNRAEKSEE

SEQ ID NO: 8344 - protein, 15 aa, Penaeus monodon
NNRAEKSEEEVHNLQ

SEQ ID NO: 8345 - protein, 15 aa, Penaeus monodon
KRMQQLENDLDQVQE

SEQ ID NO: 8346 - protein, 15 aa, Penaeus monodon
EANNRAEKSEEEVHN

SEQ ID NO: 8347 - protein, 15 aa, Penaeus monodon
LVEKDKALSNAEGEV

SEQ ID NO: 8348 - protein, 15 aa, Penaeus monodon
SLLKANIQLVEKDKA

SEQ ID NO: 8349 - protein, 15 aa, Penaeus monodon
EEVHNLQKRMQQLEN

SEQ ID NO: 8350 - protein, 15 aa, Penaeus monodon
RAEKSEEEVHNLQKR

SEQ ID NO: 8351 - protein, 15 aa, Penaeus monodon
LKANIQLVEKDKALS

SEQ ID NO: 8352 - protein, 15 aa, Penaeus monodon
ENDLDQVQESLLKAN

SEQ ID NO: 8353 - protein, 15 aa, Penaeus monodon
MQQLENDLDQVQESL

SEQ ID NO: 8354 - protein, 15 aa, Penaeus monodon
IQLVEKDKALSNAEG

SEQ ID NO: 8355 - protein, 15 aa, Penaeus monodon
DLDQVQESLLKANIQ

SEQ ID NO: 8356 - protein, 15 aa, Penaeus monodon
HNLQKRMQQLENDLD

SEQ ID NO: 8357 - protein, 15 aa, Penaeus monodon
NIQLVEKDKALSNAE

SEQ ID NO: 8358 - protein, 15 aa, Penaeus monodon
NRAEKSEEEVHNLQK

SEQ ID NO: 8359 - protein, 15 aa, Penaeus monodon
KTLTNKLKAAEARAE

SEQ ID NO: 8360 - protein, 15 aa, Penaeus monodon
QLVEKDKALSNAEGE

SEQ ID NO: 8361 - protein, 15 aa, Penaeus monodon
QVQESLLKANIQLVE

SEQ ID NO: 8362 - protein, 15 aa, Penaeus monodon
LTNKLKAAEARAEFA

SEQ ID NO: 8363 - protein, 15 aa, Penaeus monodon
TNKLKAAEARAEFAE

SEQ ID NO: 8364 - protein, 15 aa, Penaeus monodon
EKSEEEVHNLQKRMQ

SEQ ID NO: 8365 - protein, 15 aa, Penaeus monodon
RMQQLENDLDQVQES

SEQ ID NO: 8366 - protein, 15 aa, Penaeus monodon
LLKANIQLVEKDKAL

SEQ ID NO: 8367 - protein, 15 aa, Penaeus monodon
VQESLLKANIQLVEK

SEQ ID NO: 8368 - protein, 15 aa, Penaeus monodon
ESLLKANIQLVEKDK

SEQ ID NO: 8369 - protein, 15 aa, Penaeus monodon
QESLLKANIQLVEKD

SEQ ID NO: 8370 - protein, 15 aa, Penaeus monodon
SEEEVHNLQKRMQQL

SEQ ID NO: 8371 - protein, 15 aa, Penaeus monodon
IKTLTNKLKAAEARA

SEQ ID NO: 8372 - protein, 15 aa, Penaeus monodon
QIKTLTNKLKAAEAR

SEQ ID NO: 8373 - protein, 15 aa, Penaeus monodon
TLTNKLKAAEARAEF

SEQ ID NO: 8374 - protein, 15 aa, Salmo salar
LEEAEKAADESERGM

SEQ ID NO: 8375 - protein, 15 aa, Salmo salar
EADRKYEEVARKLVI

SEQ ID NO: 8376 - protein, 15 aa, Salmo salar
TRAEFAERSVAKLEK

SEQ ID NO: 8377 - protein, 15 aa, Salmo salar
EEADRKYEEVARKLV

SEQ ID NO: 8378 - protein, 15 aa, Salmo salar
EAEKAADESERGMKV

SEQ ID NO: 8379 - protein, 15 aa, Salmo salar
EEAEKAADESERGMK

SEQ ID NO: 8380 - protein, 15 aa, Salmo salar
AADESERGMKVIENR

SEQ ID NO: 8381 - protein, 15 aa, Salmo salar
ADESERGMKVIENRA

SEQ ID NO: 8382 - protein, 15 aa, Salmo salar
TNNLKSLEAQAEKYS

SEQ ID NO: 8383 - protein, 15 aa, Salmo salar
EELKTVTNNLKSLEA

SEQ ID NO: 8384 - protein, 15 aa, Salmo salar
AEEADRKYEEVARKL

SEQ ID NO: 8385 - protein, 15 aa, Salmo salar
KLEEAEKAADESERG

SEQ ID NO: 8386 - protein, 15 aa, Salmo salar
AEKAADESERGMKVI

SEQ ID NO: 8387 - protein, 15 aa, Salmo salar
AETRAEFAERSVAKL

SEQ ID NO: 8388 - protein, 15 aa, Salmo salar
AEFAERSVAKLEKTI

SEQ ID NO: 8389 - protein, 15 aa, Salmo salar
EADVASLNRRIQLVE

SEQ ID NO: 8390 - protein, 15 aa, Salmo salar
ETRAEFAERSVAKLE

SEQ ID NO: 8391 - protein, 15 aa, Salmo salar
KYEEEIKVLTDKLKE

SEQ ID NO: 8392 - protein, 15 aa, Salmo salar
RAEFAERSVAKLEKT

SEQ ID NO: 8393 - protein, 15 aa, Salmo salar
AEADVASLNRRIQLV

SEQ ID NO: 8394 - protein, 15 aa, Salmo salar
AKHIAEEADRKYEEV

SEQ ID NO: 8395 - protein, 15 aa, Salmo salar
ADVASLNRRIQLVEE

SEQ ID NO: 8396 - protein, 15 aa, Salmo salar
DVASLNRRIQLVEEE

SEQ ID NO: 8397 - protein, 15 aa, Salmo salar
IAEEADRKYEEVARK

SEQ ID NO: 8398 - protein, 15 aa, Salmo salar
EEIKVLTDKLKEAET

SEQ ID NO: 8399 - protein, 15 aa, Salmo salar
SLNRRIQLVEEELDR

SEQ ID NO: 8400 - protein, 15 aa, Salmo salar
SDLERTEERAELSEG

SEQ ID NO: 8401 - protein, 15 aa, Salmo salar
DAEADVASLNRRIQL

SEQ ID NO: 8402 - protein, 15 aa, Salmo salar
VASLNRRIQLVEEEL

SEQ ID NO: 8403 - protein, 15 aa, Salmo salar
TDAEADVASLNRRIQ

SEQ ID NO: 8404 - protein, 15 aa, Salmo salar
TKLEEAEKAADESER

SEQ ID NO: 8405 - protein, 15 aa, Salmo salar
IQLKEAKHIAEEADR

SEQ ID NO: 8406 - protein, 15 aa, Salmo salar
DIQLKEAKHIAEEAD

SEQ ID NO: 8407 - protein, 15 aa, Salmo salar
RRIQLVEEELDRAQE

SEQ ID NO: 8408 - protein, 15 aa, Salmo salar
AERSVAKLEKTIDDL

SEQ ID NO: 8409 - protein, 15 aa, Salmo salar
LKEAETRAEFAERSV

SEQ ID NO: 8410 - protein, 15 aa, Salmo salar
KEAETRAEFAERSVA

SEQ ID NO: 8411 - protein, 15 aa, Salmo salar
KLKEAETRAEFAERS

SEQ ID NO: 8412 - protein, 15 aa, Salmo salar
HIAEEADRKYEEVAR

SEQ ID NO: 8413 - protein, 15 aa, Salmo salar
EAETRAEFAERSVAK

SEQ ID NO: 8414 - protein, 15 aa, Salmo salar
IQLVEEELDRAQERL

SEQ ID NO: 8415 - protein, 15 aa, Salmo salar
RIQLVEEELDRAQER

SEQ ID NO: 8416 - protein, 15 aa, Salmo salar
TDKLKEAETRAEFAE

SEQ ID NO: 8417 - protein, 15 aa, Salmo salar
DKLKEAETRAEFAER

SEQ ID NO: 8418 - protein, 15 aa, Salmo salar
LKEAKHIAEEADRKY

SEQ ID NO: 8419 - protein, 15 aa, Salmo salar
LTKLEEAEKAADESE

SEQ ID NO: 8420 - protein, 15 aa, Salmo salar
QLKEAKHIAEEADRK

SEQ ID NO: 8421 - protein, 15 aa, Salmo salar
KEAKHIAEEADRKYE

SEQ ID NO: 8422 - protein, 15 aa, Salmo salar
RLATALTKLEEAEKA

SEQ ID NO: 8423 - protein, 15 aa, Salmo salar
KHIAEEADRKYEEVA

SEQ ID NO: 8424 - protein, 15 aa, Salmo salar
ALTKLEEAEKAADES

SEQ ID NO: 8425 - protein, 15 aa, Salmo salar
YEEEIKVLTDKLKEA

SEQ ID NO: 8426 - protein, 15 aa, Salmo salar
ESERGMKVIENRASK

SEQ ID NO: 8427 - protein, 15 aa, Salmo salar
ERTEERAELSEGKCS

SEQ ID NO: 8428 - protein, 15 aa, Salmo salar
IKKKMQMLKLDKENA

SEQ ID NO: 8429 - protein, 15 aa, Salmo salar
DESERGMKVIENRAS

SEQ ID NO: 8430 - protein, 15 aa, Salmo salar
RKYEEVARKLVIIES

SEQ ID NO: 8431 - protein, 15 aa, Salmo salar
DAIKKKMQMLKLDKE

SEQ ID NO: 8432 - protein, 15 aa, Salmo salar
NRRIQLVEEELDRAQ

SEQ ID NO: 8433 - protein, 15 aa, Salmo salar
AIKKKMQMLKLDKEN

SEQ ID NO: 8434 - protein, 15 aa, Salmo salar
LNRRIQLVEEELDRA

SEQ ID NO: 8435 - protein, 15 aa, Salmo salar
VLTDKLKEAETRAEF

SEQ ID NO: 8436 - protein, 15 aa, Salmo salar
EIKVLTDKLKEAETR

SEQ ID NO: 8437 - protein, 15 aa, Salmo salar
FAERSVAKLEKTIDD

SEQ ID NO: 8438 - protein, 15 aa, Salmo salar
LTDKLKEAETRAEFA

SEQ ID NO: 8439 - protein, 15 aa, Salmo salar
ADRKYEEVARKLVII

SEQ ID NO: 8440 - protein, 15 aa, Salmo salar
ERLATALTKLEEAEK

SEQ ID NO: 8441 - protein, 15 aa, Salmo salar
EEELKTVTNNLKSLE

SEQ ID NO: 8442 - protein, 15 aa, Salmo salar
KKKMQMLKLDKENAL

SEQ ID NO: 8443 - protein, 15 aa, Salmo salar
EFAERSVAKLEKTID

SEQ ID NO: 8444 - protein, 15 aa, Salmo salar
VARKLVIIESDLERT

SEQ ID NO: 8445 - protein, 15 aa, Salmo salar
LEEELKTVTNNLKSL

SEQ ID NO: 8446 - protein, 15 aa, Salmo salar
QERLATALTKLEEAE

SEQ ID NO: 8447 - protein, 15 aa, Salmo salar
ASLNRRIQLVEEELD

SEQ ID NO: 8448 - protein, 15 aa, Salmo salar
ESDLERTEERAELSE

SEQ ID NO: 8449 - protein, 15 aa, Salmo salar
LERTEERAELSEGKC

SEQ ID NO: 8450 - protein, 15 aa, Salmo salar
IIESDLERTEERAEL

SEQ ID NO: 8451 - protein, 15 aa, Salmo salar
DRKYEEVARKLVIIE

SEQ ID NO: 8452 - protein, 15 aa, Salmo salar
DLERTEERAELSEGK

SEQ ID NO: 8453 - protein, 13 aa, Malus domestica
ILEGNGGPGTIKK

SEQ ID NO: 8454 - protein, 13 aa, Prunus persica
EGDGGPGTIKKIT

SEQ ID NO: 8455 - protein, 13 aa, Prunus persica
EGDGGPGTIKKIT

SEQ ID NO: 8456 - protein, 13 aa, Fragaria ananassa
EGDGGPGTIKKIT

SEQ ID NO: 8457 - protein, 13 aa, Prunus persica
ILEGDGGPGTIKK

SEQ ID NO: 8458 - protein, 13 aa, Prunus persica
ILEGDGGPGTIKK

SEQ ID NO: 8459 - protein, 13 aa, Prunus persica
GDGGPGTIKKITF

SEQ ID NO: 8460 - protein, 13 aa, Prunus persica
GDGGPGTIKKITF

SEQ ID NO: 8461 - protein, 13 aa, Fragaria ananassa
GDGGPGTIKKITF

SEQ ID NO: 8462 - protein, 13 aa, Prunus persica
LEGDGGPGTIKKI

SEQ ID NO: 8463 - protein, 13 aa, Fragaria ananassa
LEGDGGPGTIKKI

SEQ ID NO: 8464 - protein, 13 aa, Prunus persica
LEGDGGPGTIKKI

SEQ ID NO: 8465 - protein, 13 aa, Juglans regia
GNGGPGTIKKINF

SEQ ID NO: 8466 - protein, 13 aa, Pyrus communis
ILEGNGGPGTIKK

SEQ ID NO: 8467 - protein, 13 aa, Alnus glutinosa
NIEGNGGPGTIKK

SEQ ID NO: 8468 - protein, 13 aa, Arachis hypogaea
EIVEGNGGPGTIK

SEQ ID NO: 8469 - protein, 13 aa, Vigna radiata
GNGGPGTIKKISF

SEQ ID NO: 8470 - protein, 13 aa, Betula verrucosa
GNGGPGTIKKISF

SEQ ID NO: 8471 - protein, 13 aa, Castanea sativa
IEGNGGPGTIKKI

SEQ ID NO: 8472 - protein, 13 aa, Quercus alba
IEGNGGPGTIKKI

SEQ ID NO: 8473 - protein, 13 aa, Fagus sylvatica
EGSGGPGTIKKIT

SEQ ID NO: 8474 - protein, 13 aa, Fragaria ananassa
GGPGTIKKITFGE

SEQ ID NO: 8475 - protein, 13 aa, Prunus persica
GGPGTIKKITFGE

SEQ ID NO: 8476 - protein, 13 aa, Prunus persica
GGPGTIKKITFGE

SEQ ID NO: 8477 - protein, 13 aa, Juglans regia
IIEGNGGPGTIKK

SEQ ID NO: 8478 - protein, 13 aa, Quercus alba
IIEGNGGPGTIKK

SEQ ID NO: 8479 - protein, 13 aa, Castanea sativa
IIEGNGGPGTIKK

SEQ ID NO: 8480 - protein, 13 aa, Malus domestica
LEGNGGPGTIKKI

SEQ ID NO: 8481 - protein, 13 aa, Pyrus communis
LEGNGGPGTIKKI

SEQ ID NO: 8482 - protein, 13 aa, Prunus persica
DGGPGTIKKITFG

SEQ ID NO: 8483 - protein, 13 aa, Fragaria ananassa
DGGPGTIKKITFG

SEQ ID NO: 8484 - protein, 13 aa, Prunus persica
DGGPGTIKKITFG

SEQ ID NO: 8485 - protein, 13 aa, Corylus avellana
NVEGNGGPGTIKN

SEQ ID NO: 8486 - protein, 13 aa, Fagus sylvatica
IIEGSGGPGTIKK

SEQ ID NO: 8487 - protein, 13 aa, Malus domestica
EGNGGPGTIKKIT

SEQ ID NO: 8488 - protein, 13 aa, Betula platyphylla
EGNGGPGTIKKIT

SEQ ID NO: 8489 - protein, 13 aa, Pyrus communis
EGNGGPGTIKKIT

SEQ ID NO: 8490 - protein, 13 aa, Quercus alba
EGNGGPGTIKKIT

SEQ ID NO: 8491 - protein, 13 aa, Alnus glutinosa
EGNGGPGTIKKIT

SEQ ID NO: 8492 - protein, 13 aa, Castanea sativa
EGNGGPGTIKKIT

SEQ ID NO: 8493 - protein, 13 aa, Glycine max
EGNGGPGTIKKIT

SEQ ID NO: 8494 - protein, 13 aa, Malus domestica
GNGGPGTIKKITF

SEQ ID NO: 8495 - protein, 13 aa, Betula platyphylla
GNGGPGTIKKITF

SEQ ID NO: 8496 - protein, 13 aa, Pyrus communis
GNGGPGTIKKITF

SEQ ID NO: 8497 - protein, 13 aa, Quercus alba
GNGGPGTIKKITF

SEQ ID NO: 8498 - protein, 13 aa, Castanea sativa
GNGGPGTIKKITF

SEQ ID NO: 8499 - protein, 13 aa, Alnus glutinosa
GNGGPGTIKKITF

SEQ ID NO: 8500 - protein, 13 aa, Glycine max
GNGGPGTIKKITF

SEQ ID NO: 8501 - protein, 13 aa, Betula platyphylla
ENIEGNGGPGTIK

SEQ ID NO: 8502 - protein, 13 aa, Carpinus betulus
NGGPGTIKNITFA

SEQ ID NO: 8503 - protein, 13 aa, Ostrya carpinifolia
NGGPGTIKNITFA

SEQ ID NO: 8504 - protein, 13 aa, Arachis hypogaea
IVEGNGGPGTIKK

SEQ ID NO: 8505 - protein, 13 aa, Vigna radiata
IVEGNGGPGTIKK

SEQ ID NO: 8506 - protein, 13 aa, Glycine max
NVEGNGGPGTIKK

SEQ ID NO: 8507 - protein, 13 aa, Fagus sylvatica
IEGSGGPGTIKKI

SEQ ID NO: 8508 - protein, 13 aa, Fagus sylvatica
GSGGPGTIKKITF

SEQ ID NO: 8509 - protein, 13 aa, Corylus avellana
GNGGPGTIKNITF

SEQ ID NO: 8510 - protein, 13 aa, Betula verrucosa
NIEGNGGPGTIKK

SEQ ID NO: 8511 - protein, 13 aa, Betula platyphylla
NIEGNGGPGTIKK

SEQ ID NO: 8512 - protein, 13 aa, Prunus avium
VGTIKKVTFGEGS

SEQ ID NO: 8513 - protein, 13 aa, Actinidia chinensis
TIKEVTFGEGSHH

SEQ ID NO: 8514 - protein, 13 aa, Morus alba
GNGGPGTVKKITL

SEQ ID NO: 8515 - protein, 13 aa, Morus bombycis
GNGGPGTVKKITL

SEQ ID NO: 8516 - protein, 13 aa, Arachis hypogaea
GNGGPGTIKKLTI

SEQ ID NO: 8517 - protein, 13 aa, Juglans regia
GGPGTIKKINFGE

SEQ ID NO: 8518 - protein, 13 aa, Betula verrucosa
IEGNGGPGTIKKI

SEQ ID NO: 8519 - protein, 13 aa, Juglans regia
IEGNGGPGTIKKI

SEQ ID NO: 8520 - protein, 13 aa, Alnus glutinosa
IEGNGGPGTIKKI

SEQ ID NO: 8521 - protein, 13 aa, Betula platyphylla
IEGNGGPGTIKKI

SEQ ID NO: 8522 - protein, 13 aa, Glycine max
VEGNGGPGTIKKI

SEQ ID NO: 8523 - protein, 13 aa, Vigna radiata
VEGNGGPGTIKKI

SEQ ID NO: 8524 - protein, 13 aa, Glycine max
NGGPGTIKKITFL

SEQ ID NO: 8525 - protein, 13 aa, Corylus avellana
NGGPGTIKNITFG

SEQ ID NO: 8526 - protein, 13 aa, Castanea sativa
GGPGTIKKITFGE

SEQ ID NO: 8527 - protein, 13 aa, Quercus alba
GGPGTIKKITFGE

SEQ ID NO: 8528 - protein, 13 aa, Pyrus communis
GGPGTIKKITFGE

SEQ ID NO: 8529 - protein, 13 aa, Malus domestica
GGPGTIKKITFGE

SEQ ID NO: 8530 - protein, 13 aa, Alnus glutinosa
NGGPGTIKKITFP

SEQ ID NO: 8531 - protein, 13 aa, Betula platyphylla
NGGPGTIKKITFP

SEQ ID NO: 8532 - protein, 13 aa, Fagus sylvatica
PGTIKKITFGEGS

SEQ ID NO: 8533 - protein, 13 aa, Prunus persica
PGTIKKITFGEGS

SEQ ID NO: 8534 - protein, 13 aa, Malus domestica
PGTIKKITFGEGS

SEQ ID NO: 8535 - protein, 13 aa, Prunus persica
PGTIKKITFGEGS

SEQ ID NO: 8536 - protein, 13 aa, Pyrus communis
PGTIKKITFGEGS

SEQ ID NO: 8537 - protein, 13 aa, Pyrus communis
NGGPGTIKKITFG

SEQ ID NO: 8538 - protein, 13 aa, Castanea sativa
NGGPGTIKKITFG

SEQ ID NO: 8539 - protein, 13 aa, Quercus alba
NGGPGTIKKITFG

SEQ ID NO: 8540 - protein, 13 aa, Malus domestica
NGGPGTIKKITFG

SEQ ID NO: 8541 - protein, 13 aa, Juglans regia
EGNGGPGTIKKIN

SEQ ID NO: 8542 - protein, 13 aa, Corylus avellana
GGPGTIKNITFGE

SEQ ID NO: 8543 - protein, 13 aa, Fragaria ananassa
ILEGDGGPGTIKK

SEQ ID NO: 8544 - protein, 13 aa, Juglans regia
NGGPGTIKKINFG

SEQ ID NO: 8545 - protein, 13 aa, Arachis hypogaea
EGNGGPGTIKKLT

SEQ ID NO: 8546 - protein, 13 aa, Arachis hypogaea
VEGNGGPGTIKKL

SEQ ID NO: 8547 - protein, 13 aa, Vigna radiata
EGNGGPGTIKKIS

SEQ ID NO: 8548 - protein, 13 aa, Betula verrucosa
EGNGGPGTIKKIS

SEQ ID NO: 8549 - protein, 13 aa, Alnus glutinosa
GGPGTIKKITFPE

SEQ ID NO: 8550 - protein, 13 aa, Betula platyphylla
GGPGTIKKITFPE

SEQ ID NO: 8551 - protein, 13 aa, Morus alba
EGNGGPGTVKKIT

SEQ ID NO: 8552 - protein, 13 aa, Morus bombycis
EGNGGPGTVKKIT

SEQ ID NO: 8553 - protein, 13 aa, Corylus avellana
VEGNGGPGTIKNI

SEQ ID NO: 8554 - protein, 13 aa, Corylus avellana
EGNGGPGTIKNIT

SEQ ID NO: 8555 - protein, 13 aa, Fagus sylvatica
SGGPGTIKKITFG

SEQ ID NO: 8556 - protein, 13 aa, Morus alba
TVEGNGGPGTVKK

SEQ ID NO: 8557 - protein, 13 aa, Morus bombycis
TVEGNGGPGTVKK

SEQ ID NO: 8558 - protein, 13 aa, Ostrya carpinifolia
VGGNGGPGTIKNI

SEQ ID NO: 8559 - protein, 13 aa, Carpinus betulus
VGGNGGPGTIKNI

SEQ ID NO: 8560 - protein, 13 aa, Glycine max
GGPGTIKKITFLE

SEQ ID NO: 8561 - protein, 13 aa, Morus bombycis
NGGPGTVKKITLP

SEQ ID NO: 8562 - protein, 13 aa, Morus alba
NGGPGTVKKITLP

SEQ ID NO: 8563 - protein, 13 aa, Quercus alba
PGTIKKITFGEAS

SEQ ID NO: 8564 - protein, 13 aa, Castanea sativa
PGTIKKITFGEAS

SEQ ID NO: 8565 - protein, 13 aa, Vigna radiata
EIVEGNGGPGTIK

SEQ ID NO: 8566 - protein, 13 aa, Alnus glutinosa
PGTIKKITFPEGS

SEQ ID NO: 8567 - protein, 13 aa, Betula platyphylla
PGTIKKITFPEGS

SEQ ID NO: 8568 - protein, 13 aa, Vigna radiata
PGTIKKISFVEDG

SEQ ID NO: 8569 - protein, 13 aa, Prunus persica
GPGTIKKITFGEG

SEQ ID NO: 8570 - protein, 13 aa, Fragaria ananassa
GPGTIKKITFGEG

SEQ ID NO: 8571 - protein, 13 aa, Fagus sylvatica
GPGTIKKITFGEG

SEQ ID NO: 8572 - protein, 13 aa, Prunus persica
GPGTIKKITFGEG

SEQ ID NO: 8573 - protein, 13 aa, Pyrus communis
GPGTIKKITFGEG

SEQ ID NO: 8574 - protein, 13 aa, Malus domestica
GPGTIKKITFGEG

SEQ ID NO: 8575 - protein, 13 aa, Betula verrucosa
GGPGTIKKISFPE

SEQ ID NO: 8576 - protein, 13 aa, Betula verrucosa
VENIEGNGGPGTI

SEQ ID NO: 8577 - protein, 13 aa, Alnus glutinosa
VENIEGNGGPGTI

SEQ ID NO: 8578 - protein, 13 aa, Ostrya carpinifolia
GGPGTIKNITFAE

SEQ ID NO: 8579 - protein, 13 aa, Carpinus betulus
GGPGTIKNITFAE

SEQ ID NO: 8580 - protein, 13 aa, Prunus avium
GVGTIKKVTFGEG

SEQ ID NO: 8581 - protein, 13 aa, Carpinus betulus
PGTIKNITFAEGI

SEQ ID NO: 8582 - protein, 13 aa, Fagus sylvatica
GGPGTIKKITFGE

SEQ ID NO: 8583 - protein, 13 aa, Prunus persica
PRLFKAFVLDADN

SEQ ID NO: 8584 - protein, 13 aa, Pyrus communis
PRLFKAFVLDADN

SEQ ID NO: 8585 - protein, 13 aa, Prunus persica
PRLFKAFVLDADN

SEQ ID NO: 8586 - protein, 13 aa, Fragaria ananassa
PGTIKKITFGEGS

SEQ ID NO: 8587 - protein, 13 aa, Vigna radiata
NGGPGTIKKISFV

SEQ ID NO: 8588 - protein, 13 aa, Corylus avellana
PGTIKNITFGEGS

SEQ ID NO: 8589 - protein, 13 aa, Juglans regia
PGTIKKINFGEGS

SEQ ID NO: 8590 - protein, 13 aa, Betula verrucosa
NGGPGTIKKISFP

SEQ ID NO: 8591 - protein, 13 aa, Betula verrucosa
ENIEGNGGPGTIK

SEQ ID NO: 8592 - protein, 13 aa, Alnus glutinosa
ENIEGNGGPGTIK

SEQ ID NO: 8593 - protein, 13 aa, Juglans regia
ARLFKAFVLDADN

SEQ ID NO: 8594 - protein, 13 aa, Vigna radiata
VEIVEGNGGPGTI

SEQ ID NO: 8595 - protein, 13 aa, Ostrya carpinifolia
PGTIKNITFAEGS

SEQ ID NO: 8596 - protein, 13 aa, Malus domestica
EILEGNGGPGTIK

SEQ ID NO: 8597 - protein, 13 aa, Pyrus communis
EILEGNGGPGTIK

SEQ ID NO: 8598 - protein, 13 aa, Glycine max
PGTIKKITFLEDG

SEQ ID NO: 8599 - protein, 13 aa, Betula verrucosa
PGTIKKISFPEGF

SEQ ID NO: 8600 - protein, 13 aa, Betula platyphylla
AENIEGNGGPGTI

SEQ ID NO: 8601 - protein, 13 aa, Prunus avium
ILEGDGGVGTIKK

SEQ ID NO: 8602 - protein, 13 aa, Carpinus betulus
ENVGGNGGPGTIK

SEQ ID NO: 8603 - protein, 13 aa, Ostrya carpinifolia
ENVGGNGGPGTIK

SEQ ID NO: 8604 - protein, 13 aa, Corylus avellana
ENVEGNGGPGTIK

SEQ ID NO: 8605 - protein, 13 aa, Glycine max
ENVEGNGGPGTIK

SEQ ID NO: 8606 - protein, 13 aa, Morus alba
GGPGTVKKITLPD

SEQ ID NO: 8607 - protein, 13 aa, Morus bombycis
GGPGTVKKITLPD

SEQ ID NO: 8608 - protein, 13 aa, Vigna radiata
GGPGTIKKISFVE

SEQ ID NO: 8609 - protein, 13 aa, Malus domestica
SRLFKAFVLDADN

SEQ ID NO: 8610 - protein, 13 aa, Fagus sylvatica
ADNLIPKVAPQAI

SEQ ID NO: 8611 - protein, 13 aa, Vigna radiata
GPGTIKKISFVED

SEQ ID NO: 8612 - protein, 13 aa, Glycine max
GPGTIKKITFLED

SEQ ID NO: 8613 - protein, 13 aa, Betula platyphylla
RLFKSFVLDADNL

SEQ ID NO: 8614 - protein, 13 aa, Betula platyphylla
GPGTIKKITFPEG

SEQ ID NO: 8615 - protein, 13 aa, Alnus glutinosa
GPGTIKKITFPEG

SEQ ID NO: 8616 - protein, 13 aa, Juglans regia
EIIEGNGGPGTIK

SEQ ID NO: 8617 - protein, 13 aa, Corylus avellana
VENVEGNGGPGTI

SEQ ID NO: 8618 - protein, 13 aa, Fagus sylvatica
DADNLIPKVAPQA

SEQ ID NO: 8619 - protein, 13 aa, Quercus alba
GPGTIKKITFGEA

SEQ ID NO: 8620 - protein, 13 aa, Castanea sativa
GPGTIKKITFGEA

SEQ ID NO: 8621 - protein, 13 aa, Fagus sylvatica
ARLFKAFVLDADN

SEQ ID NO: 8622 - protein, 13 aa, Fagus sylvatica
LDADNLIPKVAPQ

SEQ ID NO: 8623 - protein, 13 aa, Carpinus betulus
VENVGGNGGPGTI

SEQ ID NO: 8624 - protein, 13 aa, Juglans regia
LDADNLIPKVVPQ

SEQ ID NO: 8625 - protein, 13 aa, Carpinus betulus
GPGTIKNITFAEG

SEQ ID NO: 8626 - protein, 13 aa, Ostrya carpinifolia
GPGTIKNITFAEG

SEQ ID NO: 8627 - protein, 13 aa, Betula verrucosa
GPGTIKKISFPEG

SEQ ID NO: 8628 - protein, 13 aa, Prunus persica
EILEGDGGPGTIK

SEQ ID NO: 8629 - protein, 13 aa, Prunus persica
EILEGDGGPGTIK

SEQ ID NO: 8630 - protein, 13 aa, Castanea sativa
ARLFKAFVLDSDN

SEQ ID NO: 8631 - protein, 13 aa, Corylus avellana
GPGTIKNITFGEG

SEQ ID NO: 8632 - protein, 13 aa, Juglans regia
GPGTIKKINFGEG

SEQ ID NO: 8633 - protein, 13 aa, Arachis hypogaea
SVEIVEGNGGPGT

SEQ ID NO: 8634 - protein, 13 aa, Quercus alba
TEIIEGNGGPGTI

SEQ ID NO: 8635 - protein, 13 aa, Castanea sativa
TEIIEGNGGPGTI

SEQ ID NO: 8636 - protein, 13 aa, Betula verrucosa
GDNLFPKVAPQAI

SEQ ID NO: 8637 - protein, 13 aa, Juglans regia
SEIIEGNGGPGTI

SEQ ID NO: 8638 - protein, 13 aa, Morus alba
LDADNLFPKVAPQ

SEQ ID NO: 8639 - protein, 13 aa, Morus bombycis
LDADNLFPKVAPQ

SEQ ID NO: 8640 - protein, 13 aa, Castanea sativa
LDSDNLIPKVLPQ

SEQ ID NO: 8641 - protein, 13 aa, Prunus avium
LDADNLIPKVAPT

SEQ ID NO: 8642 - protein, 13 aa, Betula platyphylla
LDADNLIPKVAPE

SEQ ID NO: 8643 - protein, 13 aa, Fragaria ananassa
LDADNLIPKIAPQ

SEQ ID NO: 8644 - protein, 13 aa, Rubus idaeus
LDADNLIPKIAPQ

SEQ ID NO: 8645 - protein, 13 aa, Pyrus communis
LDADNLIPKIAPQ

SEQ ID NO: 8646 - protein, 13 aa, Malus domestica
LDADNLIPKIAPQ

SEQ ID NO: 8647 - protein, 13 aa, Fagus sylvatica
NLIPKVAPQAIKS

SEQ ID NO: 8648 - protein, 13 aa, Castanea sativa
EIIEGNGGPGTIK

SEQ ID NO: 8649 - protein, 13 aa, Prunus persica
LDADNLVPKIAPQ

SEQ ID NO: 8650 - protein, 13 aa, Prunus persica
LDADNLVPKIAPQ

SEQ ID NO: 8651 - protein, 13 aa, Prunus persica
LFKAFVLDADNLV

SEQ ID NO: 8652 - protein, 13 aa, Prunus persica
LFKAFVLDADNLV

SEQ ID NO: 8653 - protein, 13 aa, Pyrus communis
LFKAFVLDADNLI

SEQ ID NO: 8654 - protein, 13 aa, Malus domestica
NLIPKIAPQAIKQ

SEQ ID NO: 8655 - protein, 13 aa, Arachis hypogaea
VEIVEGNGGPGTI

SEQ ID NO: 8656 - protein, 13 aa, Pyrus communis
NLIPKIAPQAIKH

SEQ ID NO: 8657 - protein, 13 aa, Prunus avium
GDGGVGTIKKVTF

SEQ ID NO: 8658 - protein, 13 aa, Fragaria ananassa
EILEGDGGPGTIK

SEQ ID NO: 8659 - protein, 13 aa, Betula verrucosa
DGDNLFPKVAPQA

SEQ ID NO: 8660 - protein, 13 aa, Fagus sylvatica
EIIEGSGGPGTIK

SEQ ID NO: 8661 - protein, 13 aa, Prunus avium
TIKKVTFGEGSQY

SEQ ID NO: 8662 - protein, 13 aa, Juglans regia
ADNLIPKVVPQAV

SEQ ID NO: 8663 - protein, 13 aa, Juglans regia
DADNLIPKVVPQA

SEQ ID NO: 8664 - protein, 13 aa, Castanea sativa
SDNLIPKVLPQAI

SEQ ID NO: 8665 - protein, 13 aa, Prunus avium
ADNLIPKVAPTAV

SEQ ID NO: 8666 - protein, 13 aa, Carpinus betulus
GTIKNITFAEGIP

SEQ ID NO: 8667 - protein, 13 aa, Fagus sylvatica
GTIKKITFGEGSQ

SEQ ID NO: 8668 - protein, 13 aa, Prunus persica
GTIKKITFGEGSQ

SEQ ID NO: 8669 - protein, 13 aa, Malus domestica
GTIKKITFGEGSQ

SEQ ID NO: 8670 - protein, 13 aa, Prunus persica
GTIKKITFGEGSQ

SEQ ID NO: 8671 - protein, 13 aa, Pyrus communis
GTIKKITFGEGSQ

SEQ ID NO: 8672 - protein, 13 aa, Actinidia deliciosa
TIKLTTFGEGSVH

SEQ ID NO: 8673 - protein, 13 aa, Fragaria ananassa
GTIKKITFGEGSH

SEQ ID NO: 8674 - protein, 13 aa, Juglans regia
GTIKKINFGEGSQ

SEQ ID NO: 8675 - protein, 13 aa, Morus bombycis
DADNLFPKVAPQA

SEQ ID NO: 8676 - protein, 13 aa, Morus alba
DADNLFPKVAPQA

SEQ ID NO: 8677 - protein, 13 aa, Castanea sativa
LFKAFVLDSDNLI

SEQ ID NO: 8678 - protein, 13 aa, Ostrya carpinifolia
NVGGNGGPGTIKN

SEQ ID NO: 8679 - protein, 13 aa, Carpinus betulus
NVGGNGGPGTIKN

SEQ ID NO: 8680 - protein, 13 aa, Fragaria ananassa
APKLFKAFVLDAD

SEQ ID NO: 8681 - protein, 13 aa, Ostrya carpinifolia
DKLIPKVAPQAIS

SEQ ID NO: 8682 - protein, 13 aa, Prunus avium
AFILDADNLIPKV

SEQ ID NO: 8683 - protein, 13 aa, Castanea sativa
DSDNLIPKVLPQA

SEQ ID NO: 8684 - protein, 13 aa, Betula platyphylla
GTIKKITFPEGSH

SEQ ID NO: 8685 - protein, 13 aa, Glycine max
VENVEGNGGPGTI

SEQ ID NO: 8686 - protein, 13 aa, Juglans regia
RLFKAFVLDADNL

SEQ ID NO: 8687 - protein, 13 aa, Fagus sylvatica
RLFKAFVLDADNL

SEQ ID NO: 8688 - protein, 13 aa, Pyrus communis
AEILEGNGGPGTI

SEQ ID NO: 8689 - protein, 13 aa, Malus domestica
LFKAFVLDADNLI

SEQ ID NO: 8690 - protein, 13 aa, Fagus sylvatica
LFKAFVLDADNLI

SEQ ID NO: 8691 - protein, 13 aa, Rubus idaeus
LFKAFVLDADNLI

SEQ ID NO: 8692 - protein, 13 aa, Juglans regia
LFKAFVLDADNLI

SEQ ID NO: 8693 - protein, 13 aa, Fragaria ananassa
LFKAFVLDADNLI

SEQ ID NO: 8694 - protein, 13 aa, Prunus avium
DADNLIPKVAPTA

SEQ ID NO: 8695 - protein, 13 aa, Rubus idaeus
DADNLIPKIAPQA

SEQ ID NO: 8696 - protein, 13 aa, Fragaria ananassa
DADNLIPKIAPQA

SEQ ID NO: 8697 - protein, 13 aa, Malus domestica
DADNLIPKIAPQA

SEQ ID NO: 8698 - protein, 13 aa, Pyrus communis
DADNLIPKIAPQA

SEQ ID NO: 8699 - protein, 13 aa, Prunus persica
DADNLVPKIAPQA

SEQ ID NO: 8700 - protein, 13 aa, Prunus persica
DADNLVPKIAPQA

SEQ ID NO: 8701 - protein, 13 aa, Betula verrucosa
RLFKAFILDGDNL

SEQ ID NO: 8702 - protein, 13 aa, Corylus avellana
GDKLIPKVAPQAI

SEQ ID NO: 8703 - protein, 13 aa, Ostrya carpinifolia
GDKLIPKVAPQAI

SEQ ID NO: 8704 - protein, 13 aa, Morus bombycis
ADNLFPKVAPQAA

SEQ ID NO: 8705 - protein, 13 aa, Morus alba
ADNLFPKVAPQAA

SEQ ID NO: 8706 - protein, 13 aa, Corylus avellana
DGDKLIPKVAPQA

SEQ ID NO: 8707 - protein, 13 aa, Ostrya carpinifolia
DGDKLIPKVAPQA

SEQ ID NO: 8708 - protein, 13 aa, Rubus idaeus
ADNLIPKIAPQAV

SEQ ID NO: 8709 - protein, 13 aa, Fragaria ananassa
ADNLIPKIAPQAV

SEQ ID NO: 8710 - protein, 13 aa, Prunus avium
EGDGGVGTIKKVT

SEQ ID NO: 8711 - protein, 13 aa, Castanea sativa
RLFKAFVLDSDNL

SEQ ID NO: 8712 - protein, 13 aa, Betula verrucosa
LFKAFILDGDNLF

SEQ ID NO: 8713 - protein, 13 aa, Betula platyphylla
LFKSFVLDADNLI

SEQ ID NO: 8714 - protein, 13 aa, Ostrya carpinifolia
LDGDKLIPKVAPQ

SEQ ID NO: 8715 - protein, 13 aa, Corylus avellana
LDGDKLIPKVAPQ

SEQ ID NO: 8716 - protein, 13 aa, Carpinus betulus
LDGDKLIPKVAPQ

SEQ ID NO: 8717 - protein, 13 aa, Glycine max
SVENVEGNGGPGT

SEQ ID NO: 8718 - protein, 13 aa, Prunus avium
GGVGTIKKVTFGE

SEQ ID NO: 8719 - protein, 13 aa, Alnus glutinosa
RLFKAFILDGDKL

SEQ ID NO: 8720 - protein, 13 aa, Rubus idaeus
KLFKAFVLDADNL

SEQ ID NO: 8721 - protein, 13 aa, Fragaria ananassa
KLFKAFVLDADNL

SEQ ID NO: 8722 - protein, 13 aa, Prunus avium
KAFILDADNLIPK

SEQ ID NO: 8723 - protein, 13 aa, Prunus avium
LEGDGGVGTIKKV

SEQ ID NO: 8724 - protein, 13 aa, Rubus idaeus
PKLFKAFVLDADN

SEQ ID NO: 8725 - protein, 13 aa, Prunus avium
DGGVGTIKKVTFG

SEQ ID NO: 8726 - protein, 13 aa, Quercus alba
EIIEGNGGPGTIK

SEQ ID NO: 8727 - protein, 13 aa, Betula verrucosa
GTIKKISFPEGFP

SEQ ID NO: 8728 - protein, 13 aa, Prunus persica
RLFKAFVLDADNL

SEQ ID NO: 8729 - protein, 13 aa, Malus domestica
RLFKAFVLDADNL

SEQ ID NO: 8730 - protein, 13 aa, Pyrus communis
RLFKAFVLDADNL

SEQ ID NO: 8731 - protein, 13 aa, Prunus persica
RLFKAFVLDADNL

SEQ ID NO: 8732 - protein, 13 aa, Prunus avium
FILDADNLIPKVA

SEQ ID NO: 8733 - protein, 13 aa, Malus domestica
AEILEGNGGPGTI

SEQ ID NO: 8734 - protein, 13 aa, Corylus avellana
GTIKNITFGEGSR

SEQ ID NO: 8735 - protein, 13 aa, Prunus avium
LFKAFILDADNLI

SEQ ID NO: 8736 - protein, 13 aa, Alnus glutinosa
GTIKKITFPEGSP

SEQ ID NO: 8737 - protein, 13 aa, Morus bombycis
FFKAAVLDADNLF

SEQ ID NO: 8738 - protein, 13 aa, Morus alba
FFKAAVLDADNLF

SEQ ID NO: 8739 - protein, 13 aa, Fagus sylvatica
DNLIPKVAPQAIK

SEQ ID NO: 8740 - protein, 13 aa, Fagus sylvatica
VLDADNLIPKVAP

SEQ ID NO: 8741 - protein, 13 aa, Castanea sativa
GTIKKITFGEASK

SEQ ID NO: 8742 - protein, 13 aa, Prunus persica
SEILEGDGGPGTI

SEQ ID NO: 8743 - protein, 13 aa, Prunus persica
SEILEGDGGPGTI

SEQ ID NO: 8744 - protein, 13 aa, Pyrus communis
ADNLIPKIAPQAI

SEQ ID NO: 8745 - protein, 13 aa, Malus domestica
ADNLIPKIAPQAI

SEQ ID NO: 8746 - protein, 13 aa, Betula platyphylla
ARLFKSFVLDADN

SEQ ID NO: 8747 - protein, 13 aa, Prunus persica
ADNLVPKIAPQAI

SEQ ID NO: 8748 - protein, 13 aa, Prunus persica
ADNLVPKIAPQAI

SEQ ID NO: 8749 - protein, 13 aa, Juglans regia
VLDADNLIPKVVP

SEQ ID NO: 8750 - protein, 13 aa, Carpinus betulus
GNGGPGTIKNITF

SEQ ID NO: 8751 - protein, 13 aa, Ostrya carpinifolia
GNGGPGTIKNITF

SEQ ID NO: 8752 - protein, 13 aa, Prunus persica
NLVPKIAPQAIKH

SEQ ID NO: 8753 - protein, 13 aa, Prunus persica
NLVPKIAPQAIKH

SEQ ID NO: 8754 - protein, 13 aa, Fagus sylvatica
AFVLDADNLIPKV

SEQ ID NO: 8755 - protein, 13 aa, Juglans regia
AFVLDADNLIPKV

SEQ ID NO: 8756 - protein, 13 aa, Betula verrucosa
NLFPKVAPQAISS

SEQ ID NO: 8757 - protein, 13 aa, Castanea sativa
NLIPKVLPQAIKS

SEQ ID NO: 8758 - protein, 13 aa, Malus domestica
AFVLDADNLIPKI

SEQ ID NO: 8759 - protein, 13 aa, Pyrus communis
AFVLDADNLIPKI

SEQ ID NO: 8760 - protein, 13 aa, Rubus idaeus
AFVLDADNLIPKI

SEQ ID NO: 8761 - protein, 13 aa, Fragaria ananassa
AFVLDADNLIPKI

SEQ ID NO: 8762 - protein, 13 aa, Prunus persica
TIKKITFGEGSQY

SEQ ID NO: 8763 - protein, 13 aa, Malus domestica
TIKKITFGEGSQY

SEQ ID NO: 8764 - protein, 13 aa, Pyrus communis
TIKKITFGEGSQY

SEQ ID NO: 8765 - protein, 13 aa, Prunus persica
TIKKITFGEGSQY

SEQ ID NO: 8766 - protein, 13 aa, Fragaria ananassa
NLIPKIAPQAVKC

SEQ ID NO: 8767 - protein, 13 aa, Alnus glutinosa
TIKKITFPEGSPF

SEQ ID NO: 8768 - protein, 13 aa, Rubus idaeus
VLDADNLIPKIAP

SEQ ID NO: 8769 - protein, 13 aa, Fragaria ananassa
VLDADNLIPKIAP

SEQ ID NO: 8770 - protein, 13 aa, Malus domestica
VLDADNLIPKIAP

SEQ ID NO: 8771 - protein, 13 aa, Pyrus communis
VLDADNLIPKIAP

SEQ ID NO: 8772 - protein, 13 aa, Castanea sativa
VLDSDNLIPKVLP

SEQ ID NO: 8773 - protein, 13 aa, Prunus avium
FKAFILDADNLIP

SEQ ID NO: 8774 - protein, 13 aa, Betula platyphylla
KSFVLDADNLIPK

SEQ ID NO: 8775 - protein, 13 aa, Castanea sativa
AFVLDSDNLIPKV

SEQ ID NO: 8776 - protein, 13 aa, Juglans regia
KAFVLDADNLIPK

SEQ ID NO: 8777 - protein, 13 aa, Fragaria ananassa
KAFVLDADNLIPK

SEQ ID NO: 8778 - protein, 13 aa, Rubus idaeus
KAFVLDADNLIPK

SEQ ID NO: 8779 - protein, 13 aa, Fagus sylvatica
KAFVLDADNLIPK

SEQ ID NO: 8780 - protein, 13 aa, Malus domestica
KAFVLDADNLIPK

SEQ ID NO: 8781 - protein, 13 aa, Pyrus communis
KAFVLDADNLIPK

SEQ ID NO: 8782 - protein, 13 aa, Betula platyphylla
PARLFKSFVLDAD

SEQ ID NO: 8783 - protein, 13 aa, Solanum lycopersicum
LFKALVLDFDNLV

SEQ ID NO: 8784 - protein, 12 aa, Vigna radiata
FKAVEAYLLANP

SEQ ID NO: 8785 - protein, 13 aa, Ostrya carpinifolia
KLIPKVAPQAISK

SEQ ID NO: 8786 - protein, 13 aa, Pyrus communis
PPRLFKAFVLDAD

SEQ ID NO: 8787 - protein, 13 aa, Prunus persica
PPRLFKAFVLDAD

SEQ ID NO: 8788 - protein, 13 aa, Prunus persica
PPRLFKAFVLDAD

SEQ ID NO: 8789 - protein, 13 aa, Betula platyphylla
SFVLDADNLIPKV

SEQ ID NO: 8790 - protein, 13 aa, Rubus idaeus
SVIPPPKLFKAFV

SEQ ID NO: 8791 - protein, 13 aa, Pyrus communis
SEIPPPRLFKAFV

SEQ ID NO: 8792 - protein, 13 aa, Prunus persica
SEIPPPRLFKAFV

SEQ ID NO: 8793 - protein, 13 aa, Prunus persica
SEIPPPRLFKAFV

SEQ ID NO: 8794 - protein, 13 aa, Morus alba
RFFKAAVLDADNL

SEQ ID NO: 8795 - protein, 13 aa, Morus bombycis
RFFKAAVLDADNL

SEQ ID NO: 8796 - protein, 13 aa, Castanea sativa
DNLIPKVLPQAIK

SEQ ID NO: 8797 - protein, 13 aa, Juglans regia
DNLIPKVVPQAVK

SEQ ID NO: 8798 - protein, 13 aa, Juglans regia
SVIPPARLFKAFV

SEQ ID NO: 8799 - protein, 13 aa, Castanea sativa
SVIPPARLFKAFV

SEQ ID NO: 8800 - protein, 13 aa, Betula platyphylla
FVLDADNLIPKVA

SEQ ID NO: 8801 - protein, 13 aa, Fagus sylvatica
FVLDADNLIPKVA

SEQ ID NO: 8802 - protein, 13 aa, Prunus avium
DNLIPKVAPTAVK

SEQ ID NO: 8803 - protein, 13 aa, Betula platyphylla
VLDADNLIPKVAP

SEQ ID NO: 8804 - protein, 13 aa, Castanea sativa
KAFVLDSDNLIPK

SEQ ID NO: 8805 - protein, 13 aa, Fagus sylvatica
PARLFKAFVLDAD

SEQ ID NO: 8806 - protein, 13 aa, Juglans regia
PARLFKAFVLDAD

SEQ ID NO: 8807 - protein, 13 aa, Prunus avium
ILDADNLIPKVAP

SEQ ID NO: 8808 - protein, 13 aa, Fragaria ananassa
TIKKITFGEGSHY

SEQ ID NO: 8809 - protein, 13 aa, Morus alba
ARFFKAAVLDADN

SEQ ID NO: 8810 - protein, 13 aa, Morus bombycis
ARFFKAAVLDADN

SEQ ID NO: 8811 - protein, 13 aa, Rubus idaeus
NLIPKIAPQAVKS

SEQ ID NO: 8812 - protein, 13 aa, Juglans regia
FVLDADNLIPKVV

SEQ ID NO: 8813 - protein, 13 aa, Morus bombycis
VEGNGGPGTVKKI

SEQ ID NO: 8814 - protein, 13 aa, Morus alba
VEGNGGPGTVKKI

SEQ ID NO: 8815 - protein, 13 aa, Malus domestica
PSRLFKAFVLDAD

SEQ ID NO: 8816 - protein, 13 aa, Rubus idaeus
DNLIPKIAPQAVK

SEQ ID NO: 8817 - protein, 13 aa, Fragaria ananassa
DNLIPKIAPQAVK

SEQ ID NO: 8818 - protein, 13 aa, Fragaria ananassa
FVLDADNLIPKIA

SEQ ID NO: 8819 - protein, 13 aa, Rubus idaeus
FVLDADNLIPKIA

SEQ ID NO: 8820 - protein, 13 aa, Pyrus communis
FVLDADNLIPKIA

SEQ ID NO: 8821 - protein, 13 aa, Malus domestica
FVLDADNLIPKIA

SEQ ID NO: 8822 - protein, 13 aa, Fagus sylvatica
SEIIEGSGGPGTI

SEQ ID NO: 8823 - protein, 13 aa, Alnus glutinosa
KIVAAPDGGSILK

SEQ ID NO: 8824 - protein, 13 aa, Morus bombycis
KAAVLDADNLFPK

SEQ ID NO: 8825 - protein, 13 aa, Morus alba
KAAVLDADNLFPK

SEQ ID NO: 8826 - protein, 13 aa, Castanea sativa
FVLDSDNLIPKVL

SEQ ID NO: 8827 - protein, 13 aa, Pyrus communis
PPPRLFKAFVLDA

SEQ ID NO: 8828 - protein, 13 aa, Prunus persica
PPPRLFKAFVLDA

SEQ ID NO: 8829 - protein, 13 aa, Prunus persica
PPPRLFKAFVLDA

SEQ ID NO: 8830 - protein, 13 aa, Alnus glutinosa
VAAPDGGSILKIS

SEQ ID NO: 8831 - protein, 13 aa, Corylus avellana
SVENVEGNGGPGT

SEQ ID NO: 8832 - protein, 13 aa, Betula platyphylla
DADNLIPKVAPEN

SEQ ID NO: 8833 - protein, 13 aa, Alnus glutinosa
SVENIEGNGGPGT

SEQ ID NO: 8834 - protein, 13 aa, Betula verrucosa
SVENIEGNGGPGT

SEQ ID NO: 8835 - protein, 13 aa, Fagus sylvatica
LVASPDGGSILKS

SEQ ID NO: 8836 - protein, 13 aa, Castanea sativa
FKAFVLDSDNLIP

SEQ ID NO: 8837 - protein, 13 aa, Malus domestica
PPSRLFKAFVLDA

SEQ ID NO: 8838 - protein, 13 aa, Betula platyphylla
FKSFVLDADNLIP

SEQ ID NO: 8839 - protein, 13 aa, Fragaria ananassa
FKAFVLDADNLIP

SEQ ID NO: 8840 - protein, 13 aa, Juglans regia
FKAFVLDADNLIP

SEQ ID NO: 8841 - protein, 13 aa, Fagus sylvatica
FKAFVLDADNLIP

SEQ ID NO: 8842 - protein, 13 aa, Rubus idaeus
FKAFVLDADNLIP

SEQ ID NO: 8843 - protein, 13 aa, Pyrus communis
FKAFVLDADNLIP

SEQ ID NO: 8844 - protein, 13 aa, Malus domestica
FKAFVLDADNLIP

SEQ ID NO: 8845 - protein, 13 aa, Juglans regia
NLIPKVVPQAVKS

SEQ ID NO: 8846 - protein, 13 aa, Betula verrucosa
IVATPDGGSILKI

SEQ ID NO: 8847 - protein, 13 aa, Prunus persica
FKAFVLDADNLVP

SEQ ID NO: 8848 - protein, 13 aa, Prunus persica
FKAFVLDADNLVP

SEQ ID NO: 8849 - protein, 13 aa, Betula verrucosa
LDGDNLFPKVAPQ

SEQ ID NO: 8850 - protein, 13 aa, Pyrus communis
EIPPPRLFKAFVL

SEQ ID NO: 8851 - protein, 13 aa, Prunus persica
EIPPPRLFKAFVL

SEQ ID NO: 8852 - protein, 13 aa, Prunus persica
EIPPPRLFKAFVL

SEQ ID NO: 8853 - protein, 13 aa, Malus domestica
SEIPPSRLFKAFV

SEQ ID NO: 8854 - protein, 13 aa, Morus bombycis
VLDADNLFPKVAP

SEQ ID NO: 8855 - protein, 13 aa, Morus alba
VLDADNLFPKVAP

SEQ ID NO: 8856 - protein, 13 aa, Fagus sylvatica
TIKKITFGEGSQF

SEQ ID NO: 8857 - protein, 13 aa, Pyrus communis
DNLIPKIAPQAIK

SEQ ID NO: 8858 - protein, 13 aa, Malus domestica
DNLIPKIAPQAIK

SEQ ID NO: 8859 - protein, 13 aa, Rubus idaeus
PPKLFKAFVLDAD

SEQ ID NO: 8860 - protein, 13 aa, Juglans regia
VIPPARLFKAFVL

SEQ ID NO: 8861 - protein, 13 aa, Castanea sativa
VIPPARLFKAFVL

SEQ ID NO: 8862 - protein, 13 aa, Fagus sylvatica
IFKAVEAYLLANP

SEQ ID NO: 8863 - protein, 13 aa, Corylus avellana
KLIPKVAPQAITS

SEQ ID NO: 8864 - protein, 13 aa, Betula platyphylla
TIKKITFPEGSHF

SEQ ID NO: 8865 - protein, 13 aa, Quercus alba
GTIKKITFGEASK

SEQ ID NO: 8866 - protein, 13 aa, Juglans regia
TIKKINFGEGSQY

SEQ ID NO: 8867 - protein, 13 aa, Prunus avium
LFKLVEAYLLANP

SEQ ID NO: 8868 - protein, 13 aa, Betula verrucosa
KIVATPDGGSILK

SEQ ID NO: 8869 - protein, 13 aa, Morus bombycis
AAVLDADNLFPKV

SEQ ID NO: 8870 - protein, 13 aa, Morus alba
AAVLDADNLFPKV

SEQ ID NO: 8871 - protein, 13 aa, Castanea sativa
TIKKITFGEASKY

SEQ ID NO: 8872 - protein, 13 aa, Betula verrucosa
FKAFILDGDNLFP

SEQ ID NO: 8873 - protein, 13 aa, Juglans regia
IPPARLFKAFVLD

SEQ ID NO: 8874 - protein, 13 aa, Prunus persica
KAFVLDADNLVPK

SEQ ID NO: 8875 - protein, 13 aa, Prunus persica
KAFVLDADNLVPK

SEQ ID NO: 8876 - protein, 13 aa, Morus alba
AVLDADNLFPKVA

SEQ ID NO: 8877 - protein, 13 aa, Morus bombycis
AVLDADNLFPKVA

SEQ ID NO: 8878 - protein, 13 aa, Prunus persica
FVLDADNLVPKIA

SEQ ID NO: 8879 - protein, 13 aa, Prunus persica
FVLDADNLVPKIA

SEQ ID NO: 8880 - protein, 13 aa, Castanea sativa
LFKAVEAYLLANP

SEQ ID NO: 8881 - protein, 13 aa, Prunus persica
VLDADNLVPKIAP

SEQ ID NO: 8882 - protein, 13 aa, Prunus persica
VLDADNLVPKIAP

SEQ ID NO: 8883 - protein, 13 aa, Alnus glutinosa
IVAAPDGGSILKI

SEQ ID NO: 8884 - protein, 13 aa, Prunus persica
AFVLDADNLVPKI

SEQ ID NO: 8885 - protein, 13 aa, Prunus persica
AFVLDADNLVPKI

SEQ ID NO: 8886 - protein, 13 aa, Prunus persica
DNLVPKIAPQAIK

SEQ ID NO: 8887 - protein, 13 aa, Prunus persica
DNLVPKIAPQAIK

SEQ ID NO: 8888 - protein, 13 aa, Alnus glutinosa
VIPAARLFKAFIL

SEQ ID NO: 8889 - protein, 13 aa, Castanea sativa
PARLFKAFVLDSD

SEQ ID NO: 8890 - protein, 13 aa, Morus bombycis
DNLFPKVAPQAAK

SEQ ID NO: 8891 - protein, 13 aa, Morus alba
DNLFPKVAPQAAK

SEQ ID NO: 8892 - protein, 13 aa, Rubus idaeus
VIPPPKLFKAFVL

SEQ ID NO: 8893 - protein, 13 aa, Carpinus betulus
SVENVGGNGGPGT

SEQ ID NO: 8894 - protein, 13 aa, Betula verrucosa
AFILDGDNLFPKV

SEQ ID NO: 8895 - protein, 13 aa, Fagus sylvatica
TVITPARLFKAFV

SEQ ID NO: 8896 - protein, 13 aa, Quercus alba
TSVIAPARLFKAL

SEQ ID NO: 8897 - protein, 13 aa, Quercus alba
RLFKALFLDSDNL

SEQ ID NO: 8898 - protein, 13 aa, Betula verrucosa
SVIPAARLFKAFI

SEQ ID NO: 8899 - protein, 13 aa, Solanum lycopersicum
FKALVLDFDNLVP

SEQ ID NO: 8900 - protein, 13 aa, Solanum lycopersicum
AVEAYLLANPSVY

SEQ ID NO: 8901 - protein, 13 aa, Glycine max
FKAIEAYLLAHPD

SEQ ID NO: 8902 - protein, 13 aa, Corylus avellana
TIKNITFGEGSRY

SEQ ID NO: 8903 - protein, 13 aa, Castanea sativa
TSVIPPARLFKAF

SEQ ID NO: 8904 - protein, 13 aa, Betula platyphylla
SVIAPARLFKSFV

SEQ ID NO: 8905 - protein, 13 aa, Vigna radiata
SVEIVEGNGGPGT

SEQ ID NO: 8906 - protein, 13 aa, Fagus sylvatica
FKAVEAYLLANPA

SEQ ID NO: 8907 - protein, 13 aa, Prunus avium
EILEGDGGVGTIK

SEQ ID NO: 8908 - protein, 13 aa, Morus alba
SAETVEGNGGPGT

SEQ ID NO: 8909 - protein, 13 aa, Morus bombycis
SAETVEGNGGPGT

SEQ ID NO: 8910 - protein, 13 aa, Juglans regia
PPARLFKAFVLDA

SEQ ID NO: 8911 - protein, 13 aa, Betula platyphylla
VIAPARLFKSFVL

SEQ ID NO: 8912 - protein, 11 aa, Daucus carota
FKAIEAYLIAN

SEQ ID NO: 8913 - protein, 13 aa, Castanea sativa
FKAVEAYLLANPD

SEQ ID NO: 8914 - protein, 13 aa, Vigna radiata
QSVEIVEGNGGPG

SEQ ID NO: 8915 - protein, 13 aa, Morus alba
EGKEKAEGLFKLV

SEQ ID NO: 8916 - protein, 13 aa, Morus bombycis
EGKEKAEGLFKLV

SEQ ID NO: 8917 - protein, 13 aa, Juglans regia
FKAVEGYLLAHPD

SEQ ID NO: 8918 - protein, 13 aa, Rubus idaeus
PPPKLFKAFVLDA

SEQ ID NO: 8919 - protein, 13 aa, Fagus sylvatica
ITPARLFKAFVLD

SEQ ID NO: 8920 - protein, 13 aa, Juglans regia
STSVIPPARLFKA

SEQ ID NO: 8921 - protein, 13 aa, Fragaria ananassa
PKLFKAFVLDADN

SEQ ID NO: 8922 - protein, 13 aa, Prunus avium
SVIPPEKLFKAFI

SEQ ID NO: 8923 - protein, 13 aa, Rubus idaeus
IPPPKLFKAFVLD

SEQ ID NO: 8924 - protein, 13 aa, Quercus alba
LFKALFLDSDNLI

SEQ ID NO: 8925 - protein, 13 aa, Actinidia chinensis
FKALEAYLLANPD

SEQ ID NO: 8926 - protein, 13 aa, Glycine max
KSVENVEGNGGPG

SEQ ID NO: 8927 - protein, 13 aa, Fagus sylvatica
VITPARLFKAFVL

SEQ ID NO: 8928 - protein, 13 aa, Ostrya carpinifolia
RLFKSYVLDGDKL

SEQ ID NO: 8929 - protein, 13 aa, Corylus avellana
RLFKSYVLDGDKL

SEQ ID NO: 8930 - protein, 13 aa, Carpinus betulus
RLFKSYVLDGDKL

SEQ ID NO: 8931 - protein, 13 aa, Betula verrucosa
KAFILDGDNLFPK

SEQ ID NO: 8932 - protein, 13 aa, Actinidia deliciosa
FKKVEAYLLANPD

SEQ ID NO: 8933 - protein, 13 aa, Castanea sativa
ETSVIPPARLFKA

SEQ ID NO: 8934 - protein, 13 aa, Betula verrucosa
ILDGDNLFPKVAP

SEQ ID NO: 8935 - protein, 13 aa, Actinidia deliciosa
IFKKVEAYLLANP

SEQ ID NO: 8936 - protein, 13 aa, Castanea sativa
IPPARLFKAFVLD

SEQ ID NO: 8937 - protein, 13 aa, Alnus glutinosa
IKIVAAPDGGSIL

SEQ ID NO: 8938 - protein, 13 aa, Quercus alba
ARLFKALFLDSDN

SEQ ID NO: 8939 - protein, 13 aa, Betula verrucosa
VIPAARLFKAFIL

SEQ ID NO: 8940 - protein, 13 aa, Prunus avium
FKLVEAYLLANPD

SEQ ID NO: 8941 - protein, 13 aa, Malus domestica
EIPPSRLFKAFVL

SEQ ID NO: 8942 - protein, 11 aa, Apium graveolens
FKALEAYLIAN

SEQ ID NO: 8943 - protein, 13 aa, Betula verrucosa
GVFNYETETTSVI

SEQ ID NO: 8944 - protein, 13 aa, Fragaria ananassa
GKEKAAHLFKLIE

SEQ ID NO: 8945 - protein, 13 aa, Prunus avium
VFTYETEFTSVIP

SEQ ID NO: 8946 - protein, 13 aa, Betula platyphylla
SAENIEGNGGPGT

SEQ ID NO: 8947 - protein, 13 aa, Betula verrucosa
VFNYETETTSVIP

SEQ ID NO: 8948 - protein, 13 aa, Fagus sylvatica
KLVASPDGGSILK

SEQ ID NO: 8949 - protein, 13 aa, Betula verrucosa
FILDGDNLFPKVA

SEQ ID NO: 8950 - protein, 13 aa, Prunus avium
KAGKEKAAGLFKL

SEQ ID NO: 8951 - protein, 13 aa, Malus domestica
KVGKEKAHGLFKL

SEQ ID NO: 8952 - protein, 13 aa, Prunus persica
KAGKEKASNLFKL

SEQ ID NO: 8953 - protein, 13 aa, Prunus persica
KAGKEKASNLFKL

SEQ ID NO: 8954 - protein, 13 aa, Juglans regia
VFTYETESTSVIP

SEQ ID NO: 8955 - protein, 13 aa, Pyrus communis
KAGKEKAHGLFKL

SEQ ID NO: 8956 - protein, 13 aa, Fragaria ananassa
PAPKLFKAFVLDA

SEQ ID NO: 8957 - protein, 13 aa, Castanea sativa
PPARLFKAFVLDS

SEQ ID NO: 8958 - protein, 13 aa, Prunus avium
GVFTYETEFTSVI

SEQ ID NO: 8959 - protein, 13 aa, Juglans regia
KDGKEKASGLFKA

SEQ ID NO: 8960 - protein, 13 aa, Fagus sylvatica
TPARLFKAFVLDA

SEQ ID NO: 8961 - protein, 13 aa, Morus alba
KEKAEGLFKLVEG

SEQ ID NO: 8962 - protein, 13 aa, Morus bombycis
KEKAEGLFKLVEG

SEQ ID NO: 8963 - protein, 13 aa, Corylus avellana
TSVENVEGNGGPG

SEQ ID NO: 8964 - protein, 13 aa, Prunus avium
EKLFKAFILDADN

SEQ ID NO: 8965 - protein, 13 aa, Carpinus betulus
SSVENVGGNGGPG

SEQ ID NO: 8966 - protein, 13 aa, Prunus avium
NLIPKVAPTAVKG

SEQ ID NO: 8967 - protein, 13 aa, Quercus alba
ETSVIAPARLFKA

SEQ ID NO: 8968 - protein, 13 aa, Betula verrucosa
SSVENIEGNGGPG

SEQ ID NO: 8969 - protein, 13 aa, Juglans regia
GVFTYETESTSVI

SEQ ID NO: 8970 - protein, 13 aa, Quercus alba
KCVASPDGGSIMK

SEQ ID NO: 8971 - protein, 13 aa, Pyrus communis
HAEILEGNGGPGT

SEQ ID NO: 8972 - protein, 13 aa, Quercus alba
SVIAPARLFKALF

SEQ ID NO: 8973 - protein, 13 aa, Prunus avium
QVKAGKEKAAGLF

SEQ ID NO: 8974 - protein, 13 aa, Fagus sylvatica
GSILKSTSKYHTK

SEQ ID NO: 8975 - protein, 13 aa, Fragaria ananassa
VKAGKEKAAHLFK

SEQ ID NO: 8976 - protein, 13 aa, Morus bombycis
AETVEGNGGPGTV

SEQ ID NO: 8977 - protein, 13 aa, Morus alba
AETVEGNGGPGTV

SEQ ID NO: 8978 - protein, 13 aa, Betula verrucosa
VATPDGGSILKIS

SEQ ID NO: 8979 - protein, 13 aa, Juglans regia
KEKASGLFKAVEG

SEQ ID NO: 8980 - protein, 13 aa, Fragaria ananassa
HVKAGKEKAAHLF

SEQ ID NO: 8981 - protein, 13 aa, Prunus persica
VKAGKEKASNLFK

SEQ ID NO: 8982 - protein, 13 aa, Prunus persica
VKAGKEKASNLFK

SEQ ID NO: 8983 - protein, 11 aa, Vigna radiata
KAVEAYLLANP

SEQ ID NO: 8984 - protein, 13 aa, Fagus sylvatica
VASPDGGSILKST

SEQ ID NO: 8985 - protein, 13 aa, Prunus avium
GKEKAAGLFKLVE

SEQ ID NO: 8986 - protein, 13 aa, Alnus glutinosa
IPAARLFKAFILD

SEQ ID NO: 8987 - protein, 13 aa, Betula verrucosa
IPAARLFKAFILD

SEQ ID NO: 8988 - protein, 13 aa, Prunus avium
VKAGKEKAAGLFK

SEQ ID NO: 8989 - protein, 13 aa, Betula verrucosa
ARLFKAFILDGDN

SEQ ID NO: 8990 - protein, 13 aa, Morus alba
NLFPKVAPQAAKS

SEQ ID NO: 8991 - protein, 13 aa, Morus bombycis
NLFPKVAPQAAKS

SEQ ID NO: 8992 - protein, 13 aa, Rubus idaeus
KDGKERAAGLFKI

SEQ ID NO: 8993 - protein, 13 aa, Betula verrucosa
FNYETETTSVIPA

SEQ ID NO: 8994 - protein, 13 aa, Fragaria ananassa
AGKEKAAHLFKLI

SEQ ID NO: 8995 - protein, 13 aa, Actinidia chinensis
KALEAYLLANPDY

SEQ ID NO: 8996 - protein, 13 aa, Betula verrucosa
IKIVATPDGGSIL

SEQ ID NO: 8997 - protein, 13 aa, Betula platyphylla
ADNLIPKVAPENV

SEQ ID NO: 8998 - protein, 13 aa, Pyrus communis
HVKAGKEKAHGLF

SEQ ID NO: 8999 - protein, 13 aa, Prunus persica
LVASPSGGSIIKS

SEQ ID NO: 9000 - protein, 13 aa, Prunus persica
LVASPSGGSIIKS

SEQ ID NO: 9001 - protein, 13 aa, Fragaria ananassa
CAEILEGDGGPGT

SEQ ID NO: 9002 - protein, 13 aa, Pyrus communis
VKAGKEKAHGLFK

SEQ ID NO: 9003 - protein, 13 aa, Ostrya carpinifolia
VENVGGNGGPGTI

SEQ ID NO: 9004 - protein, 13 aa, Betula verrucosa
DNLFPKVAPQAIS

SEQ ID NO: 9005 - protein, 13 aa, Betula platyphylla
IAPARLFKSFVLD

SEQ ID NO: 9006 - protein, 13 aa, Glycine max
KAIEAYLLAHPDY

SEQ ID NO: 9007 - protein, 13 aa, Pyrus communis
AGKEKAHGLFKLI

SEQ ID NO: 9008 - protein, 13 aa, Betula platyphylla
KIVAAPGGGSILK

SEQ ID NO: 9009 - protein, 13 aa, Fagus sylvatica
KAVEAYLLANPAA

SEQ ID NO: 9010 - protein, 13 aa, Malus domestica
VKVGKEKAHGLFK

SEQ ID NO: 9011 - protein, 13 aa, Carpinus betulus
GGNGGPGTIKNIT

SEQ ID NO: 9012 - protein, 13 aa, Ostrya carpinifolia
GGNGGPGTIKNIT

SEQ ID NO: 9013 - protein, 13 aa, Castanea sativa
KAVEAYLLANPDL

SEQ ID NO: 9014 - protein, 13 aa, Juglans regia
VKDGKEKASGLFK

SEQ ID NO: 9015 - protein, 13 aa, Betula platyphylla
IKIVAAPGGGSIL

SEQ ID NO: 9016 - protein, 13 aa, Alnus glutinosa
ARLFKAFILDGDK

SEQ ID NO: 9017 - protein, 13 aa, Prunus avium
PEKLFKAFILDAD

SEQ ID NO: 9018 - protein, 13 aa, Corylus avellana
IVAAPGGGSILKI

SEQ ID NO: 9019 - protein, 13 aa, Ostrya carpinifolia
IVAAPGGGSILKI

SEQ ID NO: 9020 - protein, 13 aa, Prunus avium
AGKEKAAGLFKLV

SEQ ID NO: 9021 - protein, 13 aa, Betula platyphylla
APARLFKSFVLDA

SEQ ID NO: 9022 - protein, 13 aa, Prunus avium
FTYETEFTSVIPP

SEQ ID NO: 9023 - protein, 13 aa, Fagus sylvatica
KKITFGEGSQFNY

SEQ ID NO: 9024 - protein, 13 aa, Malus domestica
QAEILEGNGGPGT

SEQ ID NO: 9025 - protein, 13 aa, Prunus avium
LVEAYLLANPDAY

SEQ ID NO: 9026 - protein, 13 aa, Prunus avium
KLFKAFILDADNL

SEQ ID NO: 9027 - protein, 13 aa, Prunus avium
VIPPEKLFKAFIL

SEQ ID NO: 9028 - protein, 13 aa, Prunus avium
GTIKKVTFGEGSQ

SEQ ID NO: 9029 - protein, 13 aa, Fagus sylvatica
SILKSTSKYHTKG

SEQ ID NO: 9030 - protein, 13 aa, Prunus persica
HVKAGKEKASNLF

SEQ ID NO: 9031 - protein, 13 aa, Prunus persica
HVKAGKEKASNLF

SEQ ID NO: 9032 - protein, 13 aa, Prunus avium
IPPEKLFKAFILD

SEQ ID NO: 9033 - protein, 12 aa, Apium graveolens
LFKALEAYLIAN

SEQ ID NO: 9034 - protein, 13 aa, Castanea sativa
GLFKAVEAYLLAN

SEQ ID NO: 9035 - protein, 13 aa, Castanea sativa
AVEAYLLANPDLY

SEQ ID NO: 9036 - protein, 13 aa, Fragaria ananassa
KAGKEKAAHLFKL

SEQ ID NO: 9037 - protein, 13 aa, Malus domestica
HVKVGKEKAHGLF

SEQ ID NO: 9038 - protein, 12 aa, Actinidia deliciosa
KVEAYLLANPDC

SEQ ID NO: 9039 - protein, 13 aa, Prunus persica
SHYHTKGNVEIKE

SEQ ID NO: 9040 - protein, 13 aa, Juglans regia
SSEIIEGNGGPGT

SEQ ID NO: 9041 - protein, 13 aa, Vigna radiata
FQSVEIVEGNGGP

SEQ ID NO: 9042 - protein, 13 aa, Corylus avellana
VFNYEVETPSVIP

SEQ ID NO: 9043 - protein, 13 aa, Fagus sylvatica
LKSTSKYHTKGDH

SEQ ID NO: 9044 - protein, 13 aa, Quercus alba
CVASPDGGSIMKS

SEQ ID NO: 9045 - protein, 13 aa, Rubus idaeus
IKEEQVKDGKERA

SEQ ID NO: 9046 - protein, 13 aa, Castanea sativa
KATGLFKAVEAYL

SEQ ID NO: 9047 - protein, 13 aa, Prunus persica
STSHYHTKGDVEI

SEQ ID NO: 9048 - protein, 13 aa, Solanum lycopersicum
SKAVEAYLLANPS

SEQ ID NO: 9049 - protein, 13 aa, Pyrus communis
SISHYHTKGDIEI

SEQ ID NO: 9050 - protein, 13 aa, Prunus persica
IKKITFGEGSQYG

SEQ ID NO: 9051 - protein, 13 aa, Malus domestica
IKKITFGEGSQYG

SEQ ID NO: 9052 - protein, 13 aa, Pyrus communis
IKKITFGEGSQYG

SEQ ID NO: 9053 - protein, 13 aa, Prunus persica
IKKITFGEGSQYG

SEQ ID NO: 9054 - protein, 13 aa, Fagus sylvatica
GIFKAVEAYLLAN

SEQ ID NO: 9055 - protein, 13 aa, Prunus persica
DALGDTLEKISYE

SEQ ID NO: 9056 - protein, 13 aa, Prunus avium
KKVTFGEGSQYAY

SEQ ID NO: 9057 - protein, 13 aa, Betula verrucosa
TTSVIPAARLFKA

SEQ ID NO: 9058 - protein, 13 aa, Pyrus communis
GKEKAHGLFKLIE

SEQ ID NO: 9059 - protein, 13 aa, Prunus persica
SIIKSTSHYHTKG

SEQ ID NO: 9060 - protein, 13 aa, Fagus sylvatica
IKLVASPDGGSIL

SEQ ID NO: 9061 - protein, 13 aa, Quercus alba
STEIIEGNGGPGT

SEQ ID NO: 9062 - protein, 13 aa, Castanea sativa
STEIIEGNGGPGT

SEQ ID NO: 9063 - protein, 13 aa, Alnus glutinosa
GVFNYEAETPSVI

SEQ ID NO: 9064 - protein, 13 aa, Ostrya carpinifolia
GVFNYEAETPSVI

SEQ ID NO: 9065 - protein, 13 aa, Prunus persica
KKITFGEGSQYGY

SEQ ID NO: 9066 - protein, 13 aa, Malus domestica
KKITFGEGSQYGY

SEQ ID NO: 9067 - protein, 13 aa, Pyrus communis
KKITFGEGSQYGY

SEQ ID NO: 9068 - protein, 13 aa, Prunus persica
KKITFGEGSQYGY

SEQ ID NO: 9069 - protein, 13 aa, Betula platyphylla
GVFNYEDEATSVI

SEQ ID NO: 9070 - protein, 13 aa, Prunus persica
HSEILEGDGGPGT

SEQ ID NO: 9071 - protein, 13 aa, Prunus persica
HSEILEGDGGPGT

SEQ ID NO: 9072 - protein, 13 aa, Prunus avium
IKKVTFGEGSQYA

SEQ ID NO: 9073 - protein, 13 aa, Fragaria ananassa
DIPAPKLFKAFVL

SEQ ID NO: 9074 - protein, 13 aa, Fragaria ananassa
KKITFGEGSHYGY

SEQ ID NO: 9075 - protein, 13 aa, Ostrya carpinifolia
KVENVGGNGGPGT

SEQ ID NO: 9076 - protein, 13 aa, Corylus avellana
GVFNYEVETPSVI

SEQ ID NO: 9077 - protein, 13 aa, Glycine max
FKSVENVEGNGGP

SEQ ID NO: 9078 - protein, 13 aa, Fragaria ananassa
IKKITFGEGSHYG

SEQ ID NO: 9079 - protein, 13 aa, Fragaria ananassa
SKYHTKGDVEIKE

SEQ ID NO: 9080 - protein, 13 aa, Fagus sylvatica
AVEAYLLANPAAY

SEQ ID NO: 9081 - protein, 13 aa, Fragaria ananassa
KYHTKGDVEIKEE

SEQ ID NO: 9082 - protein, 13 aa, Quercus alba
ASPDGGSIMKSTT

SEQ ID NO: 9083 - protein, 13 aa, Malus domestica
IPPSRLFKAFVLD

SEQ ID NO: 9084 - protein, 13 aa, Actinidia deliciosa
GVGTIKLTTFGEG

SEQ ID NO: 9085 - protein, 13 aa, Prunus persica
SHYHTKGDVEIKE

SEQ ID NO: 9086 - protein, 13 aa, Prunus avium
SHYHTKGDVEIKE

SEQ ID NO: 9087 - protein, 13 aa, Prunus avium
KLVEAYLLANPDA

SEQ ID NO: 9088 - protein, 13 aa, Fragaria ananassa
SDIPAPKLFKAFV

SEQ ID NO: 9089 - protein, 13 aa, Juglans regia
LFKAVEGYLLAHP

SEQ ID NO: 9090 - protein, 13 aa, Vigna radiata
ALFKAVEAYLLAN

SEQ ID NO: 9091 - protein, 13 aa, Pyrus communis
ISHYHTKGDIEIK

SEQ ID NO: 9092 - protein, 13 aa, Glycine max
AIEAYLLAHPDYN

SEQ ID NO: 9093 - protein, 13 aa, Juglans regia
TSVIPPARLFKAF

SEQ ID NO: 9094 - protein, 13 aa, Actinidia chinensis
ALEAYLLANPDYC

SEQ ID NO: 9095 - protein, 13 aa, Prunus avium
PPEKLFKAFILDA

SEQ ID NO: 9096 - protein, 13 aa, Pyrus communis
HYHTKGDIEIKEE

SEQ ID NO: 9097 - protein, 13 aa, Fagus sylvatica
IKKITFGEGSQFN

SEQ ID NO: 9098 - protein, 13 aa, Prunus persica
IPPPRLFKAFVLD

SEQ ID NO: 9099 - protein, 13 aa, Pyrus communis
IPPPRLFKAFVLD

SEQ ID NO: 9100 - protein, 13 aa, Prunus persica
IPPPRLFKAFVLD

SEQ ID NO: 9101 - protein, 12 aa, Daucus carota
LFKAIEAYLIAN

SEQ ID NO: 9102 - protein, 13 aa, Actinidia deliciosa
VGTIKLTTFGEGS

SEQ ID NO: 9103 - protein, 13 aa, Juglans regia
KKINFGEGSQYKY

SEQ ID NO: 9104 - protein, 13 aa, Betula platyphylla
VFNYEDEATSVIA

SEQ ID NO: 9105 - protein, 13 aa, Fagus sylvatica
IPKVAPQAIKSSE

SEQ ID NO: 9106 - protein, 13 aa, Fagus sylvatica
SSEIIEGSGGPGT

SEQ ID NO: 9107 - protein, 13 aa, Actinidia deliciosa
KKVEAYLLANPDC

SEQ ID NO: 9108 - protein, 13 aa, Prunus persica
TSHYHTKGDVEIK

SEQ ID NO: 9109 - protein, 13 aa, Prunus persica
GSIIKSTSHYHTK

SEQ ID NO: 9110 - protein, 13 aa, Prunus persica
GSIIKSTSHYHTK

SEQ ID NO: 9111 - protein, 13 aa, Juglans regia
IKKINFGEGSQYK

SEQ ID NO: 9112 - protein, 13 aa, Prunus persica
GDALGDTLEKISY

SEQ ID NO: 9113 - protein, 13 aa, Carpinus betulus
VFNYEAETPSVIP

SEQ ID NO: 9114 - protein, 13 aa, Ostrya carpinifolia
VFNYEAETPSVIP

SEQ ID NO: 9115 - protein, 13 aa, Alnus glutinosa
VFNYEAETPSVIP

SEQ ID NO: 9116 - protein, 13 aa, Glycine max
ALFKAIEAYLLAH

SEQ ID NO: 9117 - protein, 13 aa, Quercus alba
AVEAYLVAHPDLY

SEQ ID NO: 9118 - protein, 13 aa, Malus domestica
STIKSISHYHTKG

SEQ ID NO: 9119 - protein, 13 aa, Pyrus communis
STIKSISHYHTKG

SEQ ID NO: 9120 - protein, 13 aa, Betula platyphylla
GDTLEKISYEIKI

SEQ ID NO: 9121 - protein, 13 aa, Fagus sylvatica
PKVAPQAIKSSEI

SEQ ID NO: 9122 - protein, 13 aa, Rubus idaeus
IEKISYEIKLVAS

SEQ ID NO: 9123 - protein, 13 aa, Betula platyphylla
EGGPLGDTLEKIS

SEQ ID NO: 9124 - protein, 13 aa, Betula platyphylla
GGPLGDTLEKISY

SEQ ID NO: 9125 - protein, 13 aa, Prunus avium
HYHTKGDVEIKEE

SEQ ID NO: 9126 - protein, 13 aa, Prunus persica
HYHTKGDVEIKEE

SEQ ID NO: 9127 - protein, 13 aa, Prunus persica
IKSTSHYHTKGNV

SEQ ID NO: 9128 - protein, 13 aa, Prunus avium
KEKAAGLFKLVEA

SEQ ID NO: 9129 - protein, 13 aa, Prunus avium
IKEEQVKAGKEKA

SEQ ID NO: 9130 - protein, 13 aa, Fragaria ananassa
EEHVKAGKEKAAH

SEQ ID NO: 9131 - protein, 13 aa, Fagus sylvatica
LEKIAYEIKLVAS

SEQ ID NO: 9132 - protein, 13 aa, Pyrus communis
TIEKISYEAKLVA

SEQ ID NO: 9133 - protein, 13 aa, Prunus persica
STSHYHTKGNVEI

SEQ ID NO: 9134 - protein, 13 aa, Fragaria ananassa
IKEEHVKAGKEKA

SEQ ID NO: 9135 - protein, 13 aa, Prunus persica
IKEEHVKAGKEKA

SEQ ID NO: 9136 - protein, 13 aa, Pyrus communis
IKEEHVKAGKEKA

SEQ ID NO: 9137 - protein, 13 aa, Prunus persica
IKEEHVKAGKEKA

SEQ ID NO: 9138 - protein, 13 aa, Pyrus communis
EKISYEAKLVASG

SEQ ID NO: 9139 - protein, 13 aa, Prunus persica
HYHTKGNVEIKEE

SEQ ID NO: 9140 - protein, 13 aa, Juglans regia
ESTSVIPPARLFK

SEQ ID NO: 9141 - protein, 13 aa, Carpinus betulus
DKLIPKVAPQVIS

SEQ ID NO: 9142 - protein, 13 aa, Prunus avium
EQVKAGKEKAAGL

SEQ ID NO: 9143 - protein, 13 aa, Actinidia chinensis
IVACPDGGSICKN

SEQ ID NO: 9144 - protein, 13 aa, Corylus avellana
DKLIPKVAPQAIT

SEQ ID NO: 9145 - protein, 13 aa, Quercus alba
TIKKITFGEASKF

SEQ ID NO: 9146 - protein, 13 aa, Malus domestica
GDALTDTIEKISY

SEQ ID NO: 9147 - protein, 13 aa, Pyrus communis
GDALTDTIEKISY

SEQ ID NO: 9148 - protein, 13 aa, Prunus avium
TTSHYHTKGDVEI

SEQ ID NO: 9149 - protein, 13 aa, Malus domestica
IKEEHVKVGKEKA

SEQ ID NO: 9150 - protein, 13 aa, Rubus idaeus
DALGDKIEKISYE

SEQ ID NO: 9151 - protein, 13 aa, Actinidia deliciosa
TLEGDGGVGTIKL

SEQ ID NO: 9152 - protein, 13 aa, Malus domestica
EKISYETKLVACG

SEQ ID NO: 9153 - protein, 13 aa, Malus domestica
TIEKISYETKLVA

SEQ ID NO: 9154 - protein, 13 aa, Actinidia chinensis
IFKALEAYLLANP

SEQ ID NO: 9155 - protein, 13 aa, Malus domestica
SHYHTKGNIEIKE

SEQ ID NO: 9156 - protein, 13 aa, Pyrus communis
EIKEEHVKAGKEK

SEQ ID NO: 9157 - protein, 13 aa, Prunus persica
EIKEEHVKAGKEK

SEQ ID NO: 9158 - protein, 13 aa, Fragaria ananassa
EIKEEHVKAGKEK

SEQ ID NO: 9159 - protein, 13 aa, Prunus persica
EIKEEHVKAGKEK

SEQ ID NO: 9160 - protein, 13 aa, Prunus persica
SIIKSTSHYHTKG

SEQ ID NO: 9161 - protein, 13 aa, Juglans regia
EKISYETKIVASH

SEQ ID NO: 9162 - protein, 13 aa, Prunus persica
EGDALGDTLEKIS

SEQ ID NO: 9163 - protein, 13 aa, Prunus persica
LEKISYETKLVAS

SEQ ID NO: 9164 - protein, 13 aa, Prunus persica
LEKISYETKLVAS

SEQ ID NO: 9165 - protein, 13 aa, Juglans regia
HYHSKGDHEIKEE

SEQ ID NO: 9166 - protein, 13 aa, Prunus avium
GSIVKTTSHYHTK

SEQ ID NO: 9167 - protein, 13 aa, Pyrus communis
SHYHTKGDIEIKE

SEQ ID NO: 9168 - protein, 13 aa, Fragaria ananassa
EHVKAGKEKAAHL

SEQ ID NO: 9169 - protein, 13 aa, Actinidia deliciosa
IVATPDGGCICKN

SEQ ID NO: 9170 - protein, 13 aa, Rubus idaeus
SIIKTTSHYHCKG

SEQ ID NO: 9171 - protein, 13 aa, Carpinus betulus
KLIPKVAPQVISS

SEQ ID NO: 9172 - protein, 13 aa, Betula platyphylla
SSAENIEGNGGPG

SEQ ID NO: 9173 - protein, 13 aa, Fagus sylvatica
EKIAYEIKLVASP

SEQ ID NO: 9174 - protein, 13 aa, Pyrus communis
KSISHYHTKGDIE

SEQ ID NO: 9175 - protein, 13 aa, Prunus avium
EIKEEQVKAGKEK

SEQ ID NO: 9176 - protein, 13 aa, Pyrus communis
EHVKAGKEKAHGL

SEQ ID NO: 9177 - protein, 13 aa, Actinidia chinensis
EIFKALEAYLLAN

SEQ ID NO: 9178 - protein, 13 aa, Pyrus communis
DALTDTIEKISYE

SEQ ID NO: 9179 - protein, 13 aa, Malus domestica
DALTDTIEKISYE

SEQ ID NO: 9180 - protein, 13 aa, Betula verrucosa
ETTSVIPAARLFK

SEQ ID NO: 9181 - protein, 13 aa, Prunus avium
KLVASPDGGSIVK

SEQ ID NO: 9182 - protein, 13 aa, Betula platyphylla
GPLGDTLEKISYE

SEQ ID NO: 9183 - protein, 13 aa, Juglans regia
SHYHSKGDHEIKE

SEQ ID NO: 9184 - protein, 13 aa, Rubus idaeus
GDALGDKIEKISY

SEQ ID NO: 9185 - protein, 13 aa, Pyrus communis
IEKISYEAKLVAS

SEQ ID NO: 9186 - protein, 13 aa, Prunus persica
IKSTSHYHTKGDV

SEQ ID NO: 9187 - protein, 13 aa, Morus bombycis
LFKLVEGYLEANP

SEQ ID NO: 9188 - protein, 13 aa, Morus alba
LFKLVEGYLEANP

SEQ ID NO: 9189 - protein, 13 aa, Corylus avellana
IPKVAPQAITSVE

SEQ ID NO: 9190 - protein, 13 aa, Prunus persica
VASPSGGSIIKST

SEQ ID NO: 9191 - protein, 13 aa, Prunus persica
VASPSGGSIIKST

SEQ ID NO: 9192 - protein, 13 aa, Prunus persica
KSTSHYHTKGDVE

SEQ ID NO: 9193 - protein, 13 aa, Rubus idaeus
EKISYEIKLVASG

SEQ ID NO: 9194 - protein, 13 aa, Prunus persica
ASPSGGSIIKSTS

SEQ ID NO: 9195 - protein, 13 aa, Prunus persica
ASPSGGSIIKSTS

SEQ ID NO: 9196 - protein, 13 aa, Prunus avium
LVASPDGGSIVKT

SEQ ID NO: 9197 - protein, 13 aa, Juglans regia
IKEEDVKDGKEKA

SEQ ID NO: 9198 - protein, 13 aa, Malus domestica
IEKISYETKLVAC

SEQ ID NO: 9199 - protein, 13 aa, Prunus persica
DALGDNLEKISYE

SEQ ID NO: 9200 - protein, 13 aa, Fagus sylvatica
ILKSTSKYHTKGD

SEQ ID NO: 9201 - protein, 13 aa, Prunus avium
EEQVKAGKEKAAG

SEQ ID NO: 9202 - protein, 13 aa, Juglans regia
IEKISYETKIVAS

SEQ ID NO: 9203 - protein, 13 aa, Prunus persica
EKISYETKLVASP

SEQ ID NO: 9204 - protein, 13 aa, Prunus persica
EKISYETKLVASP

SEQ ID NO: 9205 - protein, 13 aa, Prunus persica
GDALGDNLEKISY

SEQ ID NO: 9206 - protein, 13 aa, Pyrus communis
EEHVKAGKEKAHG

SEQ ID NO: 9207 - protein, 13 aa, Prunus avium
VASPDGGSIVKTT

SEQ ID NO: 9208 - protein, 13 aa, Malus domestica
HYHTKGNIEIKEE

SEQ ID NO: 9209 - protein, 13 aa, Prunus avium
TSHYHTKGDVEIK

SEQ ID NO: 9210 - protein, 13 aa, Prunus persica
GDTLEKISYETKL

SEQ ID NO: 9211 - protein, 13 aa, Alnus glutinosa
SSVENIEGNGGPG

SEQ ID NO: 9212 - protein, 13 aa, Prunus persica
TSHYHTKGNVEIK

SEQ ID NO: 9213 - protein, 13 aa, Juglans regia
GDALADKIEKISY

SEQ ID NO: 9214 - protein, 13 aa, Actinidia chinensis
KIVACPDGGSICK

SEQ ID NO: 9215 - protein, 13 aa, Pyrus communis
IEIKEEHVKAGKE

SEQ ID NO: 9216 - protein, 13 aa, Corylus avellana
ELKIVAAPGGGSI

SEQ ID NO: 9217 - protein, 13 aa, Ostrya carpinifolia
ELKIVAAPGGGSI

SEQ ID NO: 9218 - protein, 13 aa, Fagus sylvatica
AIKSSEIIEGSGG

SEQ ID NO: 9219 - protein, 13 aa, Prunus persica
ALGDTLEKISYET

SEQ ID NO: 9220 - protein, 13 aa, Prunus persica
YHTKGNVEIKEEH

SEQ ID NO: 9221 - protein, 13 aa, Carpinus betulus
AETPSVIPAARLF

SEQ ID NO: 9222 - protein, 13 aa, Alnus glutinosa
AETPSVIPAARLF

SEQ ID NO: 9223 - protein, 13 aa, Ostrya carpinifolia
AETPSVIPAARLF

SEQ ID NO: 9224 - protein, 13 aa, Prunus persica
GDNLEKISYETKL

SEQ ID NO: 9225 - protein, 13 aa, Juglans regia
ALADKIEKISYET

SEQ ID NO: 9226 - protein, 13 aa, Carpinus betulus
FNYEAETPSVIPA

SEQ ID NO: 9227 - protein, 13 aa, Alnus glutinosa
FNYEAETPSVIPA

SEQ ID NO: 9228 - protein, 13 aa, Ostrya carpinifolia
FNYEAETPSVIPA

SEQ ID NO: 9229 - protein, 13 aa, Fragaria ananassa
IPKIAPQAVKCAE

SEQ ID NO: 9230 - protein, 13 aa, Corylus avellana
GGGSILKISSKFH

SEQ ID NO: 9231 - protein, 13 aa, Ostrya carpinifolia
GGGSILKISSKFH

SEQ ID NO: 9232 - protein, 13 aa, Pyrus communis
LIPKIAPQAIKHA

SEQ ID NO: 9233 - protein, 13 aa, Juglans regia
TESTSVIPPARLF

SEQ ID NO: 9234 - protein, 13 aa, Ostrya carpinifolia
SKVENVGGNGGPG

SEQ ID NO: 9235 - protein, 13 aa, Actinidia deliciosa
GIFKKVEAYLLAN

SEQ ID NO: 9236 - protein, 13 aa, Juglans regia
AVKSSEIIEGNGG

SEQ ID NO: 9237 - protein, 13 aa, Malus domestica
TSEIPPSRLFKAF

SEQ ID NO: 9238 - protein, 13 aa, Fragaria ananassa
KEEHVKAGKEKAA

SEQ ID NO: 9239 - protein, 13 aa, Rubus idaeus
QVKDGKERAAGLF

SEQ ID NO: 9240 - protein, 13 aa, Carpinus betulus
IVAAPGGGSIVKI

SEQ ID NO: 9241 - protein, 13 aa, Malus domestica
IPKIAPQAIKQAE

SEQ ID NO: 9242 - protein, 13 aa, Fragaria ananassa
VEIKEEHVKAGKE

SEQ ID NO: 9243 - protein, 13 aa, Prunus persica
VEIKEEHVKAGKE

SEQ ID NO: 9244 - protein, 13 aa, Prunus persica
VEIKEEHVKAGKE

SEQ ID NO: 9245 - protein, 13 aa, Malus domestica
YHTKGNIEIKEEH

SEQ ID NO: 9246 - protein, 13 aa, Fragaria ananassa
LIPKIAPQAVKCA

SEQ ID NO: 9247 - protein, 13 aa, Prunus persica
TKGNVEIKEEHVK

SEQ ID NO: 9248 - protein, 13 aa, Fagus sylvatica
TSKYHTKGDHEIK

SEQ ID NO: 9249 - protein, 13 aa, Quercus alba
AIKSTEIIEGNGG

SEQ ID NO: 9250 - protein, 13 aa, Castanea sativa
AIKSTEIIEGNGG

SEQ ID NO: 9251 - protein, 13 aa, Malus domestica
SISHYHTKGNIEI

SEQ ID NO: 9252 - protein, 13 aa, Carpinus betulus
LKIVAAPGGGSIV

SEQ ID NO: 9253 - protein, 13 aa, Pyrus communis
KGDIEIKEEHVKA

SEQ ID NO: 9254 - protein, 13 aa, Prunus persica
HTKGNVEIKEEHV

SEQ ID NO: 9255 - protein, 13 aa, Malus domestica
HTKGNIEIKEEHV

SEQ ID NO: 9256 - protein, 13 aa, Fragaria ananassa
TSKYHTKGDVEIK

SEQ ID NO: 9257 - protein, 13 aa, Malus domestica
TKGNIEIKEEHVK

SEQ ID NO: 9258 - protein, 13 aa, Fragaria ananassa
IKTTSKYHTKGDV

SEQ ID NO: 9259 - protein, 13 aa, Prunus persica
KSTSHYHTKGNVE

SEQ ID NO: 9260 - protein, 13 aa, Prunus avium
KEEQVKAGKEKAA

SEQ ID NO: 9261 - protein, 13 aa, Prunus avium
TKGDVEIKEEQVK

SEQ ID NO: 9262 - protein, 13 aa, Morus bombycis
KFVASPSGGSIIK

SEQ ID NO: 9263 - protein, 13 aa, Alnus glutinosa
AAPDGGSILKISN

SEQ ID NO: 9264 - protein, 13 aa, Prunus persica
EEHVKAGKEKASN

SEQ ID NO: 9265 - protein, 13 aa, Prunus persica
EEHVKAGKEKASN

SEQ ID NO: 9266 - protein, 13 aa, Prunus avium
KAAGLFKLVEAYL

SEQ ID NO: 9267 - protein, 13 aa, Corylus avellana
FNYEVETPSVIPA

SEQ ID NO: 9268 - protein, 13 aa, Fagus sylvatica
STSKYHTKGDHEI

SEQ ID NO: 9269 - protein, 13 aa, Prunus avium
EKAAGLFKLVEAY

SEQ ID NO: 9270 - protein, 13 aa, Alnus glutinosa
SILKISNKFHTKG

SEQ ID NO: 9271 - protein, 13 aa, Alnus glutinosa
ILKISNKFHTKGD

SEQ ID NO: 9272 - protein, 13 aa, Betula platyphylla
GKEKGAGLFKAVE

SEQ ID NO: 9273 - protein, 13 aa, Rubus idaeus
KIEKISYEIKLVA

SEQ ID NO: 9274 - protein, 13 aa, Alnus glutinosa
KVAPEAVSSVENI

SEQ ID NO: 9275 - protein, 13 aa, Pyrus communis
KEEHVKAGKEKAH

SEQ ID NO: 9276 - protein, 13 aa, Betula platyphylla
DTLEKISYEIKIV

SEQ ID NO: 9277 - protein, 13 aa, Alnus glutinosa
EIKIVAAPDGGSI

SEQ ID NO: 9278 - protein, 13 aa, Prunus persica
EGDALGDNLEKIS

SEQ ID NO: 9279 - protein, 13 aa, Malus domestica
VGKEKAHGLFKLI

SEQ ID NO: 9280 - protein, 13 aa, Castanea sativa
TGLFKAVEAYLLA

SEQ ID NO: 9281 - protein, 13 aa, Quercus alba
NLIQKVLPQAIKS

SEQ ID NO: 9282 - protein, 13 aa, Betula platyphylla
EIKIVAAPGGGSI

SEQ ID NO: 9283 - protein, 13 aa, Prunus persica
HTKGDVEIKEEHV

SEQ ID NO: 9284 - protein, 13 aa, Fragaria ananassa
HTKGDVEIKEEHV

SEQ ID NO: 9285 - protein, 13 aa, Carpinus betulus
KIVAAPGGGSIVK

SEQ ID NO: 9286 - protein, 13 aa, Pyrus communis
HTKGDIEIKEEHV

SEQ ID NO: 9287 - protein, 13 aa, Prunus persica
KGDVEIKEEHVKA

SEQ ID NO: 9288 - protein, 13 aa, Fragaria ananassa
KGDVEIKEEHVKA

SEQ ID NO: 9289 - protein, 13 aa, Malus domestica
EEHVKVGKEKAHG

SEQ ID NO: 9290 - protein, 13 aa, Corylus avellana
TPSVIPAARLFKS

SEQ ID NO: 9291 - protein, 13 aa, Ostrya carpinifolia
TPSVIPAARLFKS

SEQ ID NO: 9292 - protein, 13 aa, Carpinus betulus
TPSVIPAARLFKS

SEQ ID NO: 9293 - protein, 13 aa, Juglans regia
KAVEGYLLAHPDA

SEQ ID NO: 9294 - protein, 13 aa, Fragaria ananassa
TTSKYHTKGDVEI

SEQ ID NO: 9295 - protein, 13 aa, Pyrus communis
YHTKGDIEIKEEH

SEQ ID NO: 9296 - protein, 13 aa, Fagus sylvatica
SKYHTKGDHEIKE

SEQ ID NO: 9297 - protein, 13 aa, Fragaria ananassa
YHTKGDVEIKEEH

SEQ ID NO: 9298 - protein, 13 aa, Prunus persica
YHTKGDVEIKEEH

SEQ ID NO: 9299 - protein, 13 aa, Juglans regia
KASGLFKAVEGYL

SEQ ID NO: 9300 - protein, 13 aa, Prunus avium
YHTKGDVEIKEEQ

SEQ ID NO: 9301 - protein, 13 aa, Prunus avium
HTKGDVEIKEEQV

SEQ ID NO: 9302 - protein, 13 aa, Fagus sylvatica
ASPDGGSILKSTS

SEQ ID NO: 9303 - protein, 13 aa, Juglans regia
ETESTSVIPPARL

SEQ ID NO: 9304 - protein, 13 aa, Actinidia deliciosa
KIVATPDGGCICK

SEQ ID NO: 9305 - protein, 13 aa, Prunus persica
IIKSTSHYHTKGD

SEQ ID NO: 9306 - protein, 13 aa, Juglans regia
DALADKIEKISYE

SEQ ID NO: 9307 - protein, 13 aa, Betula verrucosa
YETETTSVIPAAR

SEQ ID NO: 9308 - protein, 13 aa, Prunus avium
VEIKEEQVKAGKE

SEQ ID NO: 9309 - protein, 13 aa, Betula verrucosa
EIKIVATPDGGSI

SEQ ID NO: 9310 - protein, 13 aa, Arachis hypogaea
KSVEIVEGNGGPG

SEQ ID NO: 9311 - protein, 13 aa, Fagus sylvatica
SGIFKAVEAYLLA

SEQ ID NO: 9312 - protein, 13 aa, Betula platyphylla
AGKEKGAGLFKAV

SEQ ID NO: 9313 - protein, 13 aa, Prunus persica
KGNVEIKEEHVKA

SEQ ID NO: 9314 - protein, 13 aa, Prunus avium
VKTTSHYHTKGDV

SEQ ID NO: 9315 - protein, 13 aa, Corylus avellana
LKIVAAPGGGSIL

SEQ ID NO: 9316 - protein, 13 aa, Ostrya carpinifolia
LKIVAAPGGGSIL

SEQ ID NO: 9317 - protein, 13 aa, Corylus avellana
VETPSVIPAARLF

SEQ ID NO: 9318 - protein, 13 aa, Malus domestica
KGNIEIKEEHVKV

SEQ ID NO: 9319 - protein, 13 aa, Corylus avellana
PKVAPQAITSVEN

SEQ ID NO: 9320 - protein, 13 aa, Alnus glutinosa
LKISNKFHTKGDH

SEQ ID NO: 9321 - protein, 13 aa, Rubus idaeus
QAVKSVEIIEGDG

SEQ ID NO: 9322 - protein, 13 aa, Prunus avium
KGDVEIKEEQVKA

SEQ ID NO: 9323 - protein, 13 aa, Fragaria ananassa
AEILEGDGGPGTI

SEQ ID NO: 9324 - protein, 13 aa, Quercus alba
QAIKSTEIIEGNG

SEQ ID NO: 9325 - protein, 13 aa, Castanea sativa
QAIKSTEIIEGNG

SEQ ID NO: 9326 - protein, 13 aa, Rubus idaeus
KEEQVKDGKERAA

SEQ ID NO: 9327 - protein, 13 aa, Carpinus betulus
YEAETPSVIPAAR

SEQ ID NO: 9328 - protein, 13 aa, Ostrya carpinifolia
YEAETPSVIPAAR

SEQ ID NO: 9329 - protein, 13 aa, Alnus glutinosa
YEAETPSVIPAAR

SEQ ID NO: 9330 - protein, 13 aa, Prunus persica
EHVKAGKEKASNL

SEQ ID NO: 9331 - protein, 13 aa, Prunus persica
EHVKAGKEKASNL

SEQ ID NO: 9332 - protein, 13 aa, Prunus persica
KEEHVKAGKEKAS

SEQ ID NO: 9333 - protein, 13 aa, Prunus persica
KEEHVKAGKEKAS

SEQ ID NO: 9334 - protein, 13 aa, Fagus sylvatica
QAIKSSEIIEGSG

SEQ ID NO: 9335 - protein, 13 aa, Carpinus betulus
EAETPSVIPAARL

SEQ ID NO: 9336 - protein, 13 aa, Ostrya carpinifolia
EAETPSVIPAARL

SEQ ID NO: 9337 - protein, 13 aa, Alnus glutinosa
EAETPSVIPAARL

SEQ ID NO: 9338 - protein, 13 aa, Betula verrucosa
ETETTSVIPAARL

SEQ ID NO: 9339 - protein, 13 aa, Actinidia deliciosa
IKIVATPDGGCIC

SEQ ID NO: 9340 - protein, 13 aa, Ostrya carpinifolia
KIVAAPGGGSILK

SEQ ID NO: 9341 - protein, 13 aa, Corylus avellana
KIVAAPGGGSILK

SEQ ID NO: 9342 - protein, 13 aa, Malus domestica
LIPKIAPQAIKQA

SEQ ID NO: 9343 - protein, 13 aa, Malus domestica
ISHYHTKGNIEIK

SEQ ID NO: 9344 - protein, 13 aa, Morus bombycis
EKAEGLFKLVEGY

SEQ ID NO: 9345 - protein, 13 aa, Morus alba
EKAEGLFKLVEGY

SEQ ID NO: 9346 - protein, 13 aa, Rubus idaeus
AVKSVEIIEGDGG

SEQ ID NO: 9347 - protein, 13 aa, Betula platyphylla
GSILKITSKYHTK

SEQ ID NO: 9348 - protein, 13 aa, Pyrus communis
IPKIAPQAIKHAE

SEQ ID NO: 9349 - protein, 13 aa, Betula platyphylla
DNLIPKVAPENVS

SEQ ID NO: 9350 - protein, 13 aa, Corylus avellana
YEVETPSVIPAAR

SEQ ID NO: 9351 - protein, 13 aa, Malus domestica
EGDALTDTIEKIS

SEQ ID NO: 9352 - protein, 13 aa, Pyrus communis
EGDALTDTIEKIS

SEQ ID NO: 9353 - protein, 13 aa, Prunus persica
DTLEKISYETKLV

SEQ ID NO: 9354 - protein, 13 aa, Prunus persica
AGKEKASNLFKLI

SEQ ID NO: 9355 - protein, 13 aa, Prunus persica
AGKEKASNLFKLI

SEQ ID NO: 9356 - protein, 13 aa, Betula verrucosa
TETTSVIPAARLF

SEQ ID NO: 9357 - protein, 13 aa, Prunus avium
TEILEGDGGVGTI

SEQ ID NO: 9358 - protein, 13 aa, Malus domestica
ALTDTIEKISYET

SEQ ID NO: 9359 - protein, 13 aa, Actinidia chinensis
IKIVACPDGGSIC

SEQ ID NO: 9360 - protein, 13 aa, Corylus avellana
EVETPSVIPAARL

SEQ ID NO: 9361 - protein, 13 aa, Betula platyphylla
IVAAPGGGSILKI

SEQ ID NO: 9362 - protein, 13 aa, Pyrus communis
TKGDIEIKEEHVK

SEQ ID NO: 9363 - protein, 13 aa, Pyrus communis
TSEIPPPRLFKAF

SEQ ID NO: 9364 - protein, 13 aa, Prunus persica
TSEIPPPRLFKAF

SEQ ID NO: 9365 - protein, 13 aa, Prunus persica
TSEIPPPRLFKAF

SEQ ID NO: 9366 - protein, 13 aa, Alnus glutinosa
GSILKISNKFHTK

SEQ ID NO: 9367 - protein, 13 aa, Juglans regia
QAVKSSEIIEGNG

SEQ ID NO: 9368 - protein, 13 aa, Prunus avium
SIVKTTSHYHTKG

SEQ ID NO: 9369 - protein, 13 aa, Alnus glutinosa
TPSVIPAARLFKA

SEQ ID NO: 9370 - protein, 13 aa, Actinidia deliciosa
GGVGTIKLTTFGE

SEQ ID NO: 9371 - protein, 13 aa, Fragaria ananassa
TKGDVEIKEEHVK

SEQ ID NO: 9372 - protein, 13 aa, Prunus persica
TKGDVEIKEEHVK

SEQ ID NO: 9373 - protein, 13 aa, Alnus glutinosa
APDGGSILKISNK

SEQ ID NO: 9374 - protein, 13 aa, Malus domestica
EHVKVGKEKAHGL

SEQ ID NO: 9375 - protein, 13 aa, Fagus sylvatica
YEIKLVASPDGGS

SEQ ID NO: 9376 - protein, 13 aa, Ostrya carpinifolia
HELKIVAAPGGGS

SEQ ID NO: 9377 - protein, 13 aa, Carpinus betulus
HELKIVAAPGGGS

SEQ ID NO: 9378 - protein, 13 aa, Betula platyphylla
SILKITSKYHTKG

SEQ ID NO: 9379 - protein, 13 aa, Corylus avellana
KVAPQAITSVENV

SEQ ID NO: 9380 - protein, 13 aa, Corylus avellana
LRAVETYLLAHSA

SEQ ID NO: 9381 - protein, 13 aa, Carpinus betulus
IPKVAPQVISSVE

SEQ ID NO: 9382 - protein, 13 aa, Fragaria ananassa
KTTSKYHTKGDVE

SEQ ID NO: 9383 - protein, 13 aa, Juglans regia
EKASGLFKAVEGY

SEQ ID NO: 9384 - protein, 13 aa, Prunus avium
DIKLVASPDGGSI

SEQ ID NO: 9385 - protein, 13 aa, Alnus glutinosa
SPFKYVKERVDEV

SEQ ID NO: 9386 - protein, 13 aa, Betula platyphylla
ILKITSKYHTKGD

SEQ ID NO: 9387 - protein, 13 aa, Malus domestica
DTIEKISYETKLV

SEQ ID NO: 9388 - protein, 13 aa, Morus bombycis
FVASPSGGSIIKV

SEQ ID NO: 9389 - protein, 13 aa, Malus domestica
IKSISHYHTKGNI

SEQ ID NO: 9390 - protein, 13 aa, Malus domestica
KISYETKLVACGS

SEQ ID NO: 9391 - protein, 13 aa, Morus bombycis
KSAETVEGNGGPG

SEQ ID NO: 9392 - protein, 13 aa, Morus alba
KSAETVEGNGGPG

SEQ ID NO: 9393 - protein, 13 aa, Carpinus betulus
PGGGSIVKISSKF

SEQ ID NO: 9394 - protein, 13 aa, Ostrya carpinifolia
NYEAETPSVIPAA

SEQ ID NO: 9395 - protein, 13 aa, Alnus glutinosa
NYEAETPSVIPAA

SEQ ID NO: 9396 - protein, 13 aa, Carpinus betulus
NYEAETPSVIPAA

SEQ ID NO: 9397 - protein, 13 aa, Corylus avellana
KLLRAVETYLLAH

SEQ ID NO: 9398 - protein, 13 aa, Prunus persica
NVEIKEEHVKAGK

SEQ ID NO: 9399 - protein, 13 aa, Actinidia deliciosa
HIKIVATPDGGCI

SEQ ID NO: 9400 - protein, 13 aa, Prunus persica
VFTYESEFTSEIP

SEQ ID NO: 9401 - protein, 13 aa, Prunus persica
VFTYESEFTSEIP

SEQ ID NO: 9402 - protein, 13 aa, Carpinus betulus
AAPGGGSIVKISS

SEQ ID NO: 9403 - protein, 13 aa, Alnus glutinosa
GSPFKYVKERVDE

SEQ ID NO: 9404 - protein, 13 aa, Actinidia deliciosa
VATPDGGCICKNR

SEQ ID NO: 9405 - protein, 13 aa, Prunus persica
KISYETKLVASPS

SEQ ID NO: 9406 - protein, 13 aa, Prunus persica
KISYETKLVASPS

SEQ ID NO: 9407 - protein, 13 aa, Carpinus betulus
KVAPQVISSVENV

SEQ ID NO: 9408 - protein, 13 aa, Prunus avium
ASPDGGSIVKTTS

SEQ ID NO: 9409 - protein, 13 aa, Vigna radiata
DALFKAVEAYLLA

SEQ ID NO: 9410 - protein, 13 aa, Prunus persica
FTSEIPPPRLFKA

SEQ ID NO: 9411 - protein, 13 aa, Pyrus communis
FTSEIPPPRLFKA

SEQ ID NO: 9412 - protein, 13 aa, Prunus persica
FTSEIPPPRLFKA

SEQ ID NO: 9413 - protein, 13 aa, Morus alba
KFVASSSGGSIIK

SEQ ID NO: 9414 - protein, 13 aa, Pyrus communis
PKIAPQAIKHAEI

SEQ ID NO: 9415 - protein, 13 aa, Betula platyphylla
YEIKIVAAPGGGS

SEQ ID NO: 9416 - protein, 13 aa, Prunus avium
GDVEIKEEQVKAG

SEQ ID NO: 9417 - protein, 13 aa, Prunus persica
DVEIKEEHVKAGK

SEQ ID NO: 9418 - protein, 13 aa, Fragaria ananassa
DVEIKEEHVKAGK

SEQ ID NO: 9419 - protein, 13 aa, Betula platyphylla
PLGDTLEKISYEI

SEQ ID NO: 9420 - protein, 13 aa, Morus alba
KAEGLFKLVEGYL

SEQ ID NO: 9421 - protein, 13 aa, Morus bombycis
KAEGLFKLVEGYL

SEQ ID NO: 9422 - protein, 13 aa, Malus domestica
YSYTLIEGDALTD

SEQ ID NO: 9423 - protein, 13 aa, Prunus persica
FTYESEFTSEIPP

SEQ ID NO: 9424 - protein, 13 aa, Prunus persica
FTYESEFTSEIPP

SEQ ID NO: 9425 - protein, 13 aa, Actinidia chinensis
HIKIVACPDGGSI

SEQ ID NO: 9426 - protein, 13 aa, Alnus glutinosa
LKAVESYLLAHSD

SEQ ID NO: 9427 - protein, 13 aa, Pyrus communis
DTIEKISYEAKLV

SEQ ID NO: 9428 - protein, 13 aa, Betula verrucosa
LRAVESYLLAHSD

SEQ ID NO: 9429 - protein, 13 aa, Prunus persica
TLEKISYETKLVA

SEQ ID NO: 9430 - protein, 13 aa, Prunus persica
PKIAPQAIKHSEI

SEQ ID NO: 9431 - protein, 13 aa, Prunus persica
PKIAPQAIKHSEI

SEQ ID NO: 9432 - protein, 13 aa, Betula verrucosa
VKDRVDEVDHTNF

SEQ ID NO: 9433 - protein, 13 aa, Juglans regia
VKSSEIIEGNGGP

SEQ ID NO: 9434 - protein, 13 aa, Carpinus betulus
LLRAVESYLLAHT

SEQ ID NO: 9435 - protein, 13 aa, Ostrya carpinifolia
LLRAVESYLLAHT

SEQ ID NO: 9436 - protein, 13 aa, Actinidia deliciosa
DGGVGTIKLTTFG

SEQ ID NO: 9437 - protein, 13 aa, Actinidia deliciosa
EGDGGVGTIKLTT

SEQ ID NO: 9438 - protein, 13 aa, Alnus glutinosa
VSSVENIEGNGGP

SEQ ID NO: 9439 - protein, 13 aa, Pyrus communis
YAYTLIEGDALTD

SEQ ID NO: 9440 - protein, 13 aa, Prunus persica
GGSIIKSTSHYHT

SEQ ID NO: 9441 - protein, 13 aa, Prunus persica
GGSIIKSTSHYHT

SEQ ID NO: 9442 - protein, 13 aa, Prunus persica
SYTLIEGDALGDT

SEQ ID NO: 9443 - protein, 13 aa, Alnus glutinosa
FKYVKERVDEVDR

SEQ ID NO: 9444 - protein, 13 aa, Prunus persica
FKLIETYLKGHPD

SEQ ID NO: 9445 - protein, 13 aa, Prunus persica
FKLIETYLKGHPD

SEQ ID NO: 9446 - protein, 13 aa, Betula verrucosa
ISSVENIEGNGGP

SEQ ID NO: 9447 - protein, 13 aa, Betula verrucosa
LLRAVESYLLAHS

SEQ ID NO: 9448 - protein, 13 aa, Betula platyphylla
APGGGSILKITSK

SEQ ID NO: 9449 - protein, 13 aa, Rubus idaeus
IIKTTSHYHCKGG

SEQ ID NO: 9450 - protein, 13 aa, Actinidia deliciosa
SGIFKKVEAYLLA

SEQ ID NO: 9451 - protein, 13 aa, Prunus persica
LVPKIAPQAIKHS

SEQ ID NO: 9452 - protein, 13 aa, Prunus persica
LVPKIAPQAIKHS

SEQ ID NO: 9453 - protein, 13 aa, Prunus persica
IAPQAIKHSEILE

SEQ ID NO: 9454 - protein, 13 aa, Prunus persica
IAPQAIKHSEILE

SEQ ID NO: 9455 - protein, 13 aa, Quercus alba
KAAGLLKAVEAYL

SEQ ID NO: 9456 - protein, 13 aa, Betula verrucosa
FPKVAPQAISSVE

SEQ ID NO: 9457 - protein, 13 aa, Corylus avellana
AAPGGGSILKISS

SEQ ID NO: 9458 - protein, 13 aa, Ostrya carpinifolia
AAPGGGSILKISS

SEQ ID NO: 9459 - protein, 13 aa, Malus domestica
KIAPQAIKQAEIL

SEQ ID NO: 9460 - protein, 13 aa, Fragaria ananassa
KIAPQAVKCAEIL

SEQ ID NO: 9461 - protein, 13 aa, Rubus idaeus
KISYEIKLVASGR

SEQ ID NO: 9462 - protein, 13 aa, Ostrya carpinifolia
EKLLRAVESYLLA

SEQ ID NO: 9463 - protein, 13 aa, Carpinus betulus
EKLLRAVESYLLA

SEQ ID NO: 9464 - protein, 13 aa, Corylus avellana
LLRAVETYLLAHS

SEQ ID NO: 9465 - protein, 13 aa, Betula verrucosa
NYETETTSVIPAA

SEQ ID NO: 9466 - protein, 13 aa, Juglans regia
FTYETESTSVIPP

SEQ ID NO: 9467 - protein, 13 aa, Pyrus communis
GLFKLIESYLKDH

SEQ ID NO: 9468 - protein, 13 aa, Malus domestica
GLFKLIESYLKDH

SEQ ID NO: 9469 - protein, 13 aa, Malus domestica
GKEKAHGLFKLIE

SEQ ID NO: 9470 - protein, 13 aa, Corylus avellana
ITSVENVEGNGGP

SEQ ID NO: 9471 - protein, 13 aa, Fagus sylvatica
EIKLVASPDGGSI

SEQ ID NO: 9472 - protein, 13 aa, Carpinus betulus
VKERVDEVDNANF

SEQ ID NO: 9473 - protein, 13 aa, Ostrya carpinifolia
VKERVDEVDNANF

SEQ ID NO: 9474 - protein, 13 aa, Prunus avium
DVEIKEEQVKAGK

SEQ ID NO: 9475 - protein, 13 aa, Alnus glutinosa
YVKERVDEVDRVN

SEQ ID NO: 9476 - protein, 13 aa, Prunus persica
KIAPQAIKHSEIL

SEQ ID NO: 9477 - protein, 13 aa, Prunus persica
KIAPQAIKHSEIL

SEQ ID NO: 9478 - protein, 13 aa, Ostrya carpinifolia
APGGGSILKISSK

SEQ ID NO: 9479 - protein, 13 aa, Corylus avellana
APGGGSILKISSK

SEQ ID NO: 9480 - protein, 13 aa, Carpinus betulus
FVKERVDEVDNAN

SEQ ID NO: 9481 - protein, 13 aa, Ostrya carpinifolia
FVKERVDEVDNAN

SEQ ID NO: 9482 - protein, 13 aa, Alnus glutinosa
EKAVGLLKAVESY

SEQ ID NO: 9483 - protein, 13 aa, Corylus avellana
YVKERVDEVDNTN

SEQ ID NO: 9484 - protein, 13 aa, Fagus sylvatica
IKSSEIIEGSGGP

SEQ ID NO: 9485 - protein, 13 aa, Betula platyphylla
PGGGSILKITSKY

SEQ ID NO: 9486 - protein, 13 aa, Prunus avium
YDIKLVASPDGGS

SEQ ID NO: 9487 - protein, 13 aa, Carpinus betulus
KLLRAVESYLLAH

SEQ ID NO: 9488 - protein, 13 aa, Ostrya carpinifolia
KLLRAVESYLLAH

SEQ ID NO: 9489 - protein, 13 aa, Betula platyphylla
VAAPGGGSILKIT

SEQ ID NO: 9490 - protein, 13 aa, Alnus glutinosa
PDGGSILKISNKF

SEQ ID NO: 9491 - protein, 13 aa, Malus domestica
EFTSEIPPSRLFK

SEQ ID NO: 9492 - protein, 13 aa, Malus domestica
FTSEIPPSRLFKA

SEQ ID NO: 9493 - protein, 13 aa, Betula platyphylla
VSSAENIEGNGGP

SEQ ID NO: 9494 - protein, 13 aa, Carpinus betulus
LRAVESYLLAHTA

SEQ ID NO: 9495 - protein, 13 aa, Ostrya carpinifolia
LRAVESYLLAHTA

SEQ ID NO: 9496 - protein, 13 aa, Prunus persica
LGDTLEKISYETK

SEQ ID NO: 9497 - protein, 13 aa, Prunus avium
GLFKLVEAYLLAN

SEQ ID NO: 9498 - protein, 13 aa, Ostrya carpinifolia
VAAPGGGSILKIS

SEQ ID NO: 9499 - protein, 13 aa, Corylus avellana
VAAPGGGSILKIS

SEQ ID NO: 9500 - protein, 13 aa, Betula verrucosa
KVAPQAISSVENI

SEQ ID NO: 9501 - protein, 13 aa, Quercus alba
IKSTEIIEGNGGP

SEQ ID NO: 9502 - protein, 13 aa, Castanea sativa
IKSTEIIEGNGGP

SEQ ID NO: 9503 - protein, 13 aa, Malus domestica
TDTIEKISYETKL

SEQ ID NO: 9504 - protein, 13 aa, Juglans regia
ASGLFKAVEGYLL

SEQ ID NO: 9505 - protein, 13 aa, Corylus avellana
EKLLRAVETYLLA

SEQ ID NO: 9506 - protein, 13 aa, Prunus persica
VPKIAPQAIKHSE

SEQ ID NO: 9507 - protein, 13 aa, Prunus persica
VPKIAPQAIKHSE

SEQ ID NO: 9508 - protein, 13 aa, Malus domestica
FKLIESYLKDHPD

SEQ ID NO: 9509 - protein, 13 aa, Pyrus communis
FKLIESYLKDHPD

SEQ ID NO: 9510 - protein, 13 aa, Prunus avium
IVKTTSHYHTKGD

SEQ ID NO: 9511 - protein, 13 aa, Carpinus betulus
ISSVENVGGNGGP

SEQ ID NO: 9512 - protein, 13 aa, Prunus persica
YSYTLIEGDALGD

SEQ ID NO: 9513 - protein, 13 aa, Prunus persica
YSYTLIEGDALGD

SEQ ID NO: 9514 - protein, 13 aa, Betula verrucosa
ETLLRAVESYLLA

SEQ ID NO: 9515 - protein, 13 aa, Prunus persica
GKEKASNLFKLIE

SEQ ID NO: 9516 - protein, 13 aa, Prunus persica
GKEKASNLFKLIE

SEQ ID NO: 9517 - protein, 13 aa, Carpinus betulus
VAAPGGGSIVKIS

SEQ ID NO: 9518 - protein, 13 aa, Prunus avium
YSYTLIEGDALSD

SEQ ID NO: 9519 - protein, 13 aa, Malus domestica
IAPQAIKQAEILE

SEQ ID NO: 9520 - protein, 13 aa, Corylus avellana
PGGGSILKISSKF

SEQ ID NO: 9521 - protein, 13 aa, Ostrya carpinifolia
PGGGSILKISSKF

SEQ ID NO: 9522 - protein, 13 aa, Prunus persica
GNVEIKEEHVKAG

SEQ ID NO: 9523 - protein, 13 aa, Prunus persica
DNLEKISYETKLV

SEQ ID NO: 9524 - protein, 13 aa, Pyrus communis
KISYEAKLVASGS

SEQ ID NO: 9525 - protein, 13 aa, Prunus persica
NLEKISYETKLVA

SEQ ID NO: 9526 - protein, 13 aa, Malus domestica
KEKAHGLFKLIES

SEQ ID NO: 9527 - protein, 13 aa, Carpinus betulus
ETPSVIPAARLFK

SEQ ID NO: 9528 - protein, 13 aa, Corylus avellana
ETPSVIPAARLFK

SEQ ID NO: 9529 - protein, 13 aa, Alnus glutinosa
ETPSVIPAARLFK

SEQ ID NO: 9530 - protein, 13 aa, Ostrya carpinifolia
ETPSVIPAARLFK

SEQ ID NO: 9531 - protein, 13 aa, Pyrus communis
IKSISHYHTKGDI

SEQ ID NO: 9532 - protein, 13 aa, Castanea sativa
PKVLPQAIKSTEI

SEQ ID NO: 9533 - protein, 13 aa, Ostrya carpinifolia
IPKVAPQAISKVE

SEQ ID NO: 9534 - protein, 13 aa, Fragaria ananassa
GDVEIKEEHVKAG

SEQ ID NO: 9535 - protein, 13 aa, Prunus persica
GDVEIKEEHVKAG

SEQ ID NO: 9536 - protein, 13 aa, Corylus avellana
NYEVETPSVIPAA

SEQ ID NO: 9537 - protein, 13 aa, Betula verrucosa
YVKDRVDEVDHTN

SEQ ID NO: 9538 - protein, 13 aa, Alnus glutinosa
DGGSILKISNKFH

SEQ ID NO: 9539 - protein, 13 aa, Malus domestica
PKIAPQAIKQAEI

SEQ ID NO: 9540 - protein, 13 aa, Alnus glutinosa
VKERVDEVDRVNF

SEQ ID NO: 9541 - protein, 13 aa, Castanea sativa
IPKVLPQAIKSTE

SEQ ID NO: 9542 - protein, 13 aa, Prunus avium
IKLVASPDGGSIV

SEQ ID NO: 9543 - protein, 13 aa, Betula verrucosa
TLLRAVESYLLAH

SEQ ID NO: 9544 - protein, 13 aa, Betula platyphylla
AAPGGGSILKITS

SEQ ID NO: 9545 - protein, 13 aa, Morus bombycis
ASPSGGSIIKVTT

SEQ ID NO: 9546 - protein, 13 aa, Fragaria ananassa
IAPQAVKCAEILE

SEQ ID NO: 9547 - protein, 13 aa, Prunus persica
KLVASPSGGSIIK

SEQ ID NO: 9548 - protein, 13 aa, Prunus persica
KLVASPSGGSIIK

SEQ ID NO: 9549 - protein, 13 aa, Actinidia chinensis
VACPDGGSICKNR

SEQ ID NO: 9550 - protein, 13 aa, Malus domestica
SYTLIEGDALTDT

SEQ ID NO: 9551 - protein, 13 aa, Fragaria ananassa
FKLIEGYLKDHPS

SEQ ID NO: 9552 - protein, 13 aa, Prunus persica
IIKSTSHYHTKGN

SEQ ID NO: 9553 - protein, 13 aa, Alnus glutinosa
ISNKFHTKGDHEI

SEQ ID NO: 9554 - protein, 13 aa, Corylus avellana
VKERVDEVDNTNF

SEQ ID NO: 9555 - protein, 13 aa, Castanea sativa
KSTEIIEGNGGPG

SEQ ID NO: 9556 - protein, 13 aa, Quercus alba
KSTEIIEGNGGPG

SEQ ID NO: 9557 - protein, 13 aa, Carpinus betulus
GDKLIPKVAPQVI

SEQ ID NO: 9558 - protein, 13 aa, Betula verrucosa
PIGDTLEKISNEI

SEQ ID NO: 9559 - protein, 13 aa, Pyrus communis
DIEIKEEHVKAGK

SEQ ID NO: 9560 - protein, 13 aa, Rubus idaeus
GDKIEKISYEIKL

SEQ ID NO: 9561 - protein, 13 aa, Morus alba
ETVEGNGGPGTVK

SEQ ID NO: 9562 - protein, 13 aa, Morus bombycis
ETVEGNGGPGTVK

SEQ ID NO: 9563 - protein, 13 aa, Castanea sativa
LIPKVLPQAIKST

SEQ ID NO: 9564 - protein, 13 aa, Pyrus communis
IAPQAIKHAEILE

SEQ ID NO: 9565 - protein, 13 aa, Pyrus communis
LFKLIESYLKDHP

SEQ ID NO: 9566 - protein, 13 aa, Malus domestica
LFKLIESYLKDHP

SEQ ID NO: 9567 - protein, 13 aa, Castanea sativa
QETSVIPPARLFK

SEQ ID NO: 9568 - protein, 13 aa, Fagus sylvatica
KSSEIIEGSGGPG

SEQ ID NO: 9569 - protein, 13 aa, Actinidia deliciosa
GDGGVGTIKLTTF

SEQ ID NO: 9570 - protein, 13 aa, Fragaria ananassa
PKIAPQAVKCAEI

SEQ ID NO: 9571 - protein, 13 aa, Malus domestica
LTDTIEKISYETK

SEQ ID NO: 9572 - protein, 13 aa, Prunus avium
SYTLIEGDALSDV

SEQ ID NO: 9573 - protein, 13 aa, Pyrus communis
GDIEIKEEHVKAG

SEQ ID NO: 9574 - protein, 13 aa, Pyrus communis
KIAPQAIKHAEIL

SEQ ID NO: 9575 - protein, 13 aa, Carpinus betulus
DGDKLIPKVAPQV

SEQ ID NO: 9576 - protein, 13 aa, Carpinus betulus
APGGGSIVKISSK

SEQ ID NO: 9577 - protein, 13 aa, Juglans regia
KSSEIIEGNGGPG

SEQ ID NO: 9578 - protein, 13 aa, Quercus alba
IKCVASPDGGSIM

SEQ ID NO: 9579 - protein, 13 aa, Quercus alba
QETSVIAPARLFK

SEQ ID NO: 9580 - protein, 13 aa, Ostrya carpinifolia
KVAPQAISKVENV

SEQ ID NO: 9581 - protein, 13 aa, Alnus glutinosa
KISNKFHTKGDHE

SEQ ID NO: 9582 - protein, 13 aa, Fagus sylvatica
LIPKVAPQAIKSS

SEQ ID NO: 9583 - protein, 13 aa, Prunus avium
KTTSHYHTKGDVE

SEQ ID NO: 9584 - protein, 13 aa, Prunus persica
GVFTYESEFTSEI

SEQ ID NO: 9585 - protein, 13 aa, Prunus persica
GVFTYESEFTSEI

SEQ ID NO: 9586 - protein, 13 aa, Pyrus communis
EFTSEIPPPRLFK

SEQ ID NO: 9587 - protein, 13 aa, Prunus persica
EFTSEIPPPRLFK

SEQ ID NO: 9588 - protein, 13 aa, Prunus persica
EFTSEIPPPRLFK

SEQ ID NO: 9589 - protein, 13 aa, Carpinus betulus
PFKFVKERVDEVD

SEQ ID NO: 9590 - protein, 13 aa, Corylus avellana
SSKFHAKGDHEIN

SEQ ID NO: 9591 - protein, 13 aa, Betula verrucosa
KISNKYHTKGDHE

SEQ ID NO: 9592 - protein, 13 aa, Quercus alba
EKAAGLLKAVEAY

SEQ ID NO: 9593 - protein, 13 aa, Carpinus betulus
ELKIVAAPGGGSI

SEQ ID NO: 9594 - protein, 13 aa, Alnus glutinosa
VAPEAVSSVENIE

SEQ ID NO: 9595 - protein, 13 aa, Corylus avellana
LIPKVAPQAITSV

SEQ ID NO: 9596 - protein, 13 aa, Alnus glutinosa
EAVSSVENIEGNG

SEQ ID NO: 9597 - protein, 13 aa, Fagus sylvatica
DGGSILKSTSKYH

SEQ ID NO: 9598 - protein, 13 aa, Betula platyphylla
KEKGAGLFKAVEN

SEQ ID NO: 9599 - protein, 13 aa, Betula verrucosa
MGETLLRAVESYL

SEQ ID NO: 9600 - protein, 13 aa, Alnus glutinosa
KERVDEVDRVNFK

SEQ ID NO: 9601 - protein, 13 aa, Prunus avium
AGLFKLVEAYLLA

SEQ ID NO: 9602 - protein, 13 aa, Morus bombycis
GKEKAEGLFKLVE

SEQ ID NO: 9603 - protein, 13 aa, Morus alba
GKEKAEGLFKLVE

SEQ ID NO: 9604 - protein, 13 aa, Malus domestica
AIKQAEILEGNGG

SEQ ID NO: 9605 - protein, 13 aa, Corylus avellana
NFTYSYTVIEGDV

SEQ ID NO: 9606 - protein, 13 aa, Prunus persica
IEGDALGDNLEKI

SEQ ID NO: 9607 - protein, 13 aa, Betula verrucosa
EMGETLLRAVESY

SEQ ID NO: 9608 - protein, 13 aa, Fagus sylvatica
GGSILKSTSKYHT

SEQ ID NO: 9609 - protein, 13 aa, Juglans regia
PKVVPQAVKSSEI

SEQ ID NO: 9610 - protein, 13 aa, Actinidia chinensis
AEIFKALEAYLLA

SEQ ID NO: 9611 - protein, 13 aa, Alnus glutinosa
EKVCNEIKIVAAP

SEQ ID NO: 9612 - protein, 13 aa, Prunus persica
LIETYLKGHPDAY

SEQ ID NO: 9613 - protein, 13 aa, Prunus persica
LIETYLKGHPDAY

SEQ ID NO: 9614 - protein, 13 aa, Alnus glutinosa
APEAVSSVENIEG

SEQ ID NO: 9615 - protein, 13 aa, Actinidia chinensis
AFILDGDTLVPKV

SEQ ID NO: 9616 - protein, 13 aa, Betula verrucosa
GETLLRAVESYLL

SEQ ID NO: 9617 - protein, 13 aa, Carpinus betulus
FKYNYTVIEGDVL

SEQ ID NO: 9618 - protein, 13 aa, Ostrya carpinifolia
FKYNYTVIEGDVL

SEQ ID NO: 9619 - protein, 13 aa, Pyrus communis
NEFTSEIPPPRLF

SEQ ID NO: 9620 - protein, 13 aa, Ostrya carpinifolia
SKFHAKGDHEVNA

SEQ ID NO: 9621 - protein, 13 aa, Alnus glutinosa
AFILDGDKLLPKV

SEQ ID NO: 9622 - protein, 13 aa, Actinidia chinensis
SYHIKIVACPDGG

SEQ ID NO: 9623 - protein, 13 aa, Juglans regia
KSISHYHSKGDHE

SEQ ID NO: 9624 - protein, 13 aa, Castanea sativa
KVLPQAIKSTEII

SEQ ID NO: 9625 - protein, 13 aa, Vigna radiata
SDALFKAVEAYLL

SEQ ID NO: 9626 - protein, 13 aa, Alnus glutinosa
SNKFHTKGDHEIN

SEQ ID NO: 9627 - protein, 13 aa, Juglans regia
KVVPQAVKSSEII

SEQ ID NO: 9628 - protein, 13 aa, Carpinus betulus
MAEKLLRAVESYL

SEQ ID NO: 9629 - protein, 13 aa, Ostrya carpinifolia
MAEKLLRAVESYL

SEQ ID NO: 9630 - protein, 13 aa, Corylus avellana
FTYSYTVIEGDVL

SEQ ID NO: 9631 - protein, 13 aa, Castanea sativa
KFVASPDGGTIMK

SEQ ID NO: 9632 - protein, 13 aa, Corylus avellana
EMAEKLLRAVETY

SEQ ID NO: 9633 - protein, 13 aa, Betula verrucosa
SILKISNKYHTKG

SEQ ID NO: 9634 - protein, 13 aa, Pyrus communis
AIKHAEILEGNGG

SEQ ID NO: 9635 - protein, 13 aa, Actinidia deliciosa
SYHIKIVATPDGG

SEQ ID NO: 9636 - protein, 13 aa, Malus domestica
KQAEILEGNGGPG

SEQ ID NO: 9637 - protein, 13 aa, Carpinus betulus
SKFHAKGYHEVNA

SEQ ID NO: 9638 - protein, 13 aa, Juglans regia
ISHYHSKGDHEIK

SEQ ID NO: 9639 - protein, 13 aa, Carpinus betulus
GSIVKISSKFHAK

SEQ ID NO: 9640 - protein, 13 aa, Ostrya carpinifolia
KERVDEVDNANFK

SEQ ID NO: 9641 - protein, 13 aa, Carpinus betulus
KERVDEVDNANFK

SEQ ID NO: 9642 - protein, 13 aa, Rubus idaeus
RGSIIKTTSHYHC

SEQ ID NO: 9643 - protein, 13 aa, Malus domestica
NEFTSEIPPSRLF

SEQ ID NO: 9644 - protein, 13 aa, Corylus avellana
LEKVCHELKIVAA

SEQ ID NO: 9645 - protein, 13 aa, Carpinus betulus
AEKLLRAVESYLL

SEQ ID NO: 9646 - protein, 13 aa, Ostrya carpinifolia
AEKLLRAVESYLL

SEQ ID NO: 9647 - protein, 13 aa, Ostrya carpinifolia
LIPKVAPQAISKV

SEQ ID NO: 9648 - protein, 13 aa, Pyrus communis
LIEGDALTDTIEK

SEQ ID NO: 9649 - protein, 13 aa, Malus domestica
LIEGDALTDTIEK

SEQ ID NO: 9650 - protein, 13 aa, Fagus sylvatica
PQAIKSSEIIEGS

SEQ ID NO: 9651 - protein, 13 aa, Ostrya carpinifolia
GGSILKISSKFHA

SEQ ID NO: 9652 - protein, 13 aa, Corylus avellana
GGSILKISSKFHA

SEQ ID NO: 9653 - protein, 13 aa, Fagus sylvatica
KVAPQAIKSSEII

SEQ ID NO: 9654 - protein, 13 aa, Betula verrucosa
GSILKISNKYHTK

SEQ ID NO: 9655 - protein, 13 aa, Morus alba
AKSAETVEGNGGP

SEQ ID NO: 9656 - protein, 13 aa, Morus bombycis
AKSAETVEGNGGP

SEQ ID NO: 9657 - protein, 13 aa, Corylus avellana
KERVDEVDNTNFT

SEQ ID NO: 9658 - protein, 13 aa, Carpinus betulus
IVKISSKFHAKGY

SEQ ID NO: 9659 - protein, 13 aa, Carpinus betulus
KFVKERVDEVDNA

SEQ ID NO: 9660 - protein, 13 aa, Ostrya carpinifolia
KFVKERVDEVDNA

SEQ ID NO: 9661 - protein, 13 aa, Malus domestica
QAIKQAEILEGNG

SEQ ID NO: 9662 - protein, 13 aa, Malus domestica
KSISHYHTKGNIE

SEQ ID NO: 9663 - protein, 13 aa, Pyrus communis
ALTDTIEKISYEA

SEQ ID NO: 9664 - protein, 13 aa, Betula verrucosa
PKVAPQAISSVEN

SEQ ID NO: 9665 - protein, 13 aa, Juglans regia
GLFKAVEGYLLAH

SEQ ID NO: 9666 - protein, 13 aa, Actinidia chinensis
LTYSYTIIEGDVL

SEQ ID NO: 9667 - protein, 13 aa, Juglans regia
KIEKISYETKIVA

SEQ ID NO: 9668 - protein, 13 aa, Quercus alba
IEKAAGLLKAVEA

SEQ ID NO: 9669 - protein, 13 aa, Pyrus communis
QAIKHAEILEGNG

SEQ ID NO: 9670 - protein, 13 aa, Ostrya carpinifolia
GTIKNITFAEGSP

SEQ ID NO: 9671 - protein, 13 aa, Malus domestica
KLIESYLKDHPDA

SEQ ID NO: 9672 - protein, 13 aa, Pyrus communis
KLIESYLKDHPDA

SEQ ID NO: 9673 - protein, 13 aa, Betula verrucosa
AISSVENIEGNGG

SEQ ID NO: 9674 - protein, 13 aa, Prunus avium
GGSIVKTTSHYHT

SEQ ID NO: 9675 - protein, 13 aa, Carpinus betulus
SSKFHAKGYHEVN

SEQ ID NO: 9676 - protein, 13 aa, Carpinus betulus
LEKVSHELKIVAA

SEQ ID NO: 9677 - protein, 13 aa, Ostrya carpinifolia
LEKVSHELKIVAA

SEQ ID NO: 9678 - protein, 13 aa, Carpinus betulus
SIVKISSKFHAKG

SEQ ID NO: 9679 - protein, 13 aa, Ostrya carpinifolia
SSKFHAKGDHEVN

SEQ ID NO: 9680 - protein, 13 aa, Corylus avellana
GDHEINAEEMKGA

SEQ ID NO: 9681 - protein, 13 aa, Betula verrucosa
ILKISNKYHTKGD

SEQ ID NO: 9682 - protein, 13 aa, Morus bombycis
TKFVASPSGGSII

SEQ ID NO: 9683 - protein, 13 aa, Betula verrucosa
LFPKVAPQAISSV

SEQ ID NO: 9684 - protein, 13 aa, Morus bombycis
PARFFKAAVLDAD

SEQ ID NO: 9685 - protein, 13 aa, Morus alba
PARFFKAAVLDAD

SEQ ID NO: 9686 - protein, 13 aa, Ostrya carpinifolia
GDHEVNAEEMKGA

SEQ ID NO: 9687 - protein, 13 aa, Betula platyphylla
LKITSKYHTKGDI

SEQ ID NO: 9688 - protein, 13 aa, Corylus avellana
EKVCHELKIVAAP

SEQ ID NO: 9689 - protein, 13 aa, Rubus idaeus
IPKIAPQAVKSVE

SEQ ID NO: 9690 - protein, 13 aa, Ostrya carpinifolia
GSILKISSKFHAK

SEQ ID NO: 9691 - protein, 13 aa, Corylus avellana
GSILKISSKFHAK

SEQ ID NO: 9692 - protein, 13 aa, Morus alba
TKFVASSSGGSII

SEQ ID NO: 9693 - protein, 13 aa, Solanum lycopersicum
ISKAVEAYLLANP

SEQ ID NO: 9694 - protein, 13 aa, Glycine max
ADALFKAIEAYLL

SEQ ID NO: 9695 - protein, 13 aa, Glycine max
LFKAIEAYLLAHP

SEQ ID NO: 9696 - protein, 13 aa, Fagus sylvatica
VAPQAIKSSEIIE

SEQ ID NO: 9697 - protein, 13 aa, Rubus idaeus
DKIEKISYEIKLV

SEQ ID NO: 9698 - protein, 13 aa, Prunus persica
LIEGDALGDNLEK

SEQ ID NO: 9699 - protein, 13 aa, Morus alba
FVASSSGGSIIKV

SEQ ID NO: 9700 - protein, 13 aa, Betula verrucosa
LKISNKYHTKGDH

SEQ ID NO: 9701 - protein, 13 aa, Alnus glutinosa
AVSSVENIEGNGG

SEQ ID NO: 9702 - protein, 13 aa, Juglans regia
IPKVVPQAVKSSE

SEQ ID NO: 9703 - protein, 13 aa, Carpinus betulus
EKVSHELKIVAAP

SEQ ID NO: 9704 - protein, 13 aa, Ostrya carpinifolia
EKVSHELKIVAAP

SEQ ID NO: 9705 - protein, 13 aa, Prunus persica
LGDNLEKISYETK

SEQ ID NO: 9706 - protein, 13 aa, Castanea sativa
EKATGLFKAVEAY

SEQ ID NO: 9707 - protein, 13 aa, Prunus persica
SYTLIEGDALGDN

SEQ ID NO: 9708 - protein, 13 aa, Castanea sativa
IEKATGLFKAVEA

SEQ ID NO: 9709 - protein, 13 aa, Corylus avellana
AITSVENVEGNGG

SEQ ID NO: 9710 - protein, 13 aa, Prunus persica
SEFTSEIPPPRLF

SEQ ID NO: 9711 - protein, 13 aa, Prunus persica
SEFTSEIPPPRLF

SEQ ID NO: 9712 - protein, 13 aa, Carpinus betulus
VKISSKFHAKGYH

SEQ ID NO: 9713 - protein, 13 aa, Carpinus betulus
NFKYNYTVIEGDV

SEQ ID NO: 9714 - protein, 13 aa, Ostrya carpinifolia
NFKYNYTVIEGDV

SEQ ID NO: 9715 - protein, 13 aa, Corylus avellana
SKFHAKGDHEINA

SEQ ID NO: 9716 - protein, 13 aa, Pyrus communis
KHAEILEGNGGPG

SEQ ID NO: 9717 - protein, 13 aa, Prunus persica
KHSEILEGDGGPG

SEQ ID NO: 9718 - protein, 13 aa, Prunus persica
KHSEILEGDGGPG

SEQ ID NO: 9719 - protein, 13 aa, Alnus glutinosa
NKFHTKGDHEINA

SEQ ID NO: 9720 - protein, 13 aa, Juglans regia
VVPQAVKSSEIIE

SEQ ID NO: 9721 - protein, 13 aa, Pyrus communis
AYTLIEGDALTDT

SEQ ID NO: 9722 - protein, 13 aa, Carpinus betulus
GGGSIVKISSKFH

SEQ ID NO: 9723 - protein, 13 aa, Rubus idaeus
EQVKDGKERAAGL

SEQ ID NO: 9724 - protein, 13 aa, Alnus glutinosa
PEGSPFKYVKERV

SEQ ID NO: 9725 - protein, 13 aa, Rubus idaeus
TSVIPPPKLFKAF

SEQ ID NO: 9726 - protein, 13 aa, Betula platyphylla
GGGSILKITSKYH

SEQ ID NO: 9727 - protein, 13 aa, Prunus persica
AIKHSEILEGDGG

SEQ ID NO: 9728 - protein, 13 aa, Prunus persica
AIKHSEILEGDGG

SEQ ID NO: 9729 - protein, 13 aa, Juglans regia
LIPKVVPQAVKSS

SEQ ID NO: 9730 - protein, 13 aa, Pyrus communis
ENEFTSEIPPPRL

SEQ ID NO: 9731 - protein, 13 aa, Solanum lycopersicum
NISKAVEAYLLAN

SEQ ID NO: 9732 - protein, 13 aa, Ostrya carpinifolia
FKFVKERVDEVDN

SEQ ID NO: 9733 - protein, 13 aa, Prunus persica
KLIETYLKGHPDA

SEQ ID NO: 9734 - protein, 13 aa, Prunus persica
KLIETYLKGHPDA

SEQ ID NO: 9735 - protein, 13 aa, Corylus avellana
KISSKFHAKGDHE

SEQ ID NO: 9736 - protein, 13 aa, Ostrya carpinifolia
KISSKFHAKGDHE

SEQ ID NO: 9737 - protein, 13 aa, Carpinus betulus
GGSIVKISSKFHA

SEQ ID NO: 9738 - protein, 13 aa, Prunus persica
QAIKHSEILEGDG

SEQ ID NO: 9739 - protein, 13 aa, Prunus persica
QAIKHSEILEGDG

SEQ ID NO: 9740 - protein, 13 aa, Carpinus betulus
PKVAPQVISSVEN

SEQ ID NO: 9741 - protein, 13 aa, Juglans regia
GKEKASGLFKAVE

SEQ ID NO: 9742 - protein, 13 aa, Alnus glutinosa
LLKAVESYLLAHS

SEQ ID NO: 9743 - protein, 13 aa, Ostrya carpinifolia
EMAEKLLRAVESY

SEQ ID NO: 9744 - protein, 13 aa, Carpinus betulus
EMAEKLLRAVESY

SEQ ID NO: 9745 - protein, 13 aa, Pyrus communis
IKHAEILEGNGGP

SEQ ID NO: 9746 - protein, 13 aa, Corylus avellana
LKISSKFHAKGDH

SEQ ID NO: 9747 - protein, 13 aa, Ostrya carpinifolia
LKISSKFHAKGDH

SEQ ID NO: 9748 - protein, 13 aa, Juglans regia
SISHYHSKGDHEI

SEQ ID NO: 9749 - protein, 13 aa, Prunus persica
TLIEGDALGDTLE

SEQ ID NO: 9750 - protein, 13 aa, Pyrus communis
IEGDALTDTIEKI

SEQ ID NO: 9751 - protein, 13 aa, Malus domestica
IEGDALTDTIEKI

SEQ ID NO: 9752 - protein, 13 aa, Ostrya carpinifolia
ISSKFHAKGDHEV

SEQ ID NO: 9753 - protein, 13 aa, Pyrus communis
TLIEGDALTDTIE

SEQ ID NO: 9754 - protein, 13 aa, Malus domestica
TLIEGDALTDTIE

SEQ ID NO: 9755 - protein, 13 aa, Alnus glutinosa
PFKYVKERVDEVD

SEQ ID NO: 9756 - protein, 13 aa, Carpinus betulus
ISSKFHAKGYHEV

SEQ ID NO: 9757 - protein, 13 aa, Corylus avellana
ISSKFHAKGDHEI

SEQ ID NO: 9758 - protein, 13 aa, Prunus persica
ESEFTSEIPPPRL

SEQ ID NO: 9759 - protein, 13 aa, Prunus persica
ESEFTSEIPPPRL

SEQ ID NO: 9760 - protein, 13 aa, Malus domestica
ENEFTSEIPPSRL

SEQ ID NO: 9761 - protein, 13 aa, Ostrya carpinifolia
SILKISSKFHAKG

SEQ ID NO: 9762 - protein, 13 aa, Corylus avellana
SILKISSKFHAKG

SEQ ID NO: 9763 - protein, 13 aa, Malus domestica
LIESYLKDHPDAY

SEQ ID NO: 9764 - protein, 13 aa, Pyrus communis
LIESYLKDHPDAY

SEQ ID NO: 9765 - protein, 13 aa, Betula platyphylla
NLIPKVAPENVSS

SEQ ID NO: 9766 - protein, 13 aa, Corylus avellana
ILKISSKFHAKGD

SEQ ID NO: 9767 - protein, 13 aa, Ostrya carpinifolia
ILKISSKFHAKGD

SEQ ID NO: 9768 - protein, 13 aa, Carpinus betulus
LIPKVAPQVISSV

SEQ ID NO: 9769 - protein, 13 aa, Prunus persica
IEGDALGDTLEKI

SEQ ID NO: 9770 - protein, 13 aa, Quercus alba
DSDNLIQKVLPQA

SEQ ID NO: 9771 - protein, 13 aa, Castanea sativa
VLPQAIKSTEIIE

SEQ ID NO: 9772 - protein, 13 aa, Quercus alba
VLPQAIKSTEIIE

SEQ ID NO: 9773 - protein, 13 aa, Rubus idaeus
LIPKIAPQAVKSV

SEQ ID NO: 9774 - protein, 13 aa, Prunus persica
LIEGDALGDTLEK

SEQ ID NO: 9775 - protein, 13 aa, Rubus idaeus
GSIIKTTSHYHCK

SEQ ID NO: 9776 - protein, 13 aa, Prunus persica
IKHSEILEGDGGP

SEQ ID NO: 9777 - protein, 13 aa, Prunus persica
IKHSEILEGDGGP

SEQ ID NO: 9778 - protein, 13 aa, Morus alba
ASSSGGSIIKVTT

SEQ ID NO: 9779 - protein, 13 aa, Prunus persica
TLIEGDALGDNLE

SEQ ID NO: 9780 - protein, 13 aa, Carpinus betulus
AARLFKSYVLDGD

SEQ ID NO: 9781 - protein, 13 aa, Ostrya carpinifolia
AARLFKSYVLDGD

SEQ ID NO: 9782 - protein, 13 aa, Corylus avellana
AARLFKSYVLDGD

SEQ ID NO: 9783 - protein, 13 aa, Corylus avellana
KYVKERVDEVDNT

SEQ ID NO: 9784 - protein, 13 aa, Prunus persica
SGGSIIKSTSHYH

SEQ ID NO: 9785 - protein, 13 aa, Prunus persica
SGGSIIKSTSHYH

SEQ ID NO: 9786 - protein, 13 aa, Alnus glutinosa
PEAVSSVENIEGN

SEQ ID NO: 9787 - protein, 13 aa, Quercus alba
DNLIQKVLPQAIK

SEQ ID NO: 9788 - protein, 13 aa, Prunus persica
ALGDNLEKISYET

SEQ ID NO: 9789 - protein, 13 aa, Betula platyphylla
KITSKYHTKGDIS

SEQ ID NO: 9790 - protein, 13 aa, Glycine max
SFKSVENVEGNGG

SEQ ID NO: 9791 - protein, 13 aa, Malus domestica
IKQAEILEGNGGP

SEQ ID NO: 9792 - protein, 13 aa, Corylus avellana
AEKLLRAVETYLL

SEQ ID NO: 9793 - protein, 13 aa, Corylus avellana
MAEKLLRAVETYL

SEQ ID NO: 9794 - protein, 13 aa, Ostrya carpinifolia
PKVAPQAISKVEN

SEQ ID NO: 9795 - protein, 13 aa, Solanum lycopersicum
MNISKAVEAYLLA

SEQ ID NO: 9796 - protein, 13 aa, Rubus idaeus
EEQVKDGKERAAG

SEQ ID NO: 9797 - protein, 13 aa, Ostrya carpinifolia
PFKFVKERVDEVD

SEQ ID NO: 9798 - protein, 13 aa, Betula platyphylla
GGSILKITSKYHT

SEQ ID NO: 9799 - protein, 13 aa, Castanea sativa
AIEKATGLFKAVE

SEQ ID NO: 9800 - protein, 13 aa, Corylus avellana
HELKIVAAPGGGS

SEQ ID NO: 9801 - protein, 13 aa, Carpinus betulus
KFHAKGYHEVNAE

SEQ ID NO: 9802 - protein, 13 aa, Corylus avellana
AKGDHEINAEEMK

SEQ ID NO: 9803 - protein, 13 aa, Juglans regia
DGKEKASGLFKAV

SEQ ID NO: 9804 - protein, 13 aa, Carpinus betulus
HAKGYHEVNAEKM

SEQ ID NO: 9805 - protein, 13 aa, Prunus avium
EFTSVIPPEKLFK

SEQ ID NO: 9806 - protein, 13 aa, Betula verrucosa
PQAISSVENIEGN

SEQ ID NO: 9807 - protein, 13 aa, Ostrya carpinifolia
NYTVIEGDVLGDK

SEQ ID NO: 9808 - protein, 13 aa, Carpinus betulus
NYTVIEGDVLGDK

SEQ ID NO: 9809 - protein, 13 aa, Apium graveolens
NTALFKALEAYLI

SEQ ID NO: 9810 - protein, 13 aa, Alnus glutinosa
KAFILDGDKLLPK

SEQ ID NO: 9811 - protein, 13 aa, Carpinus betulus
ITFAEGIPFKFVK

SEQ ID NO: 9812 - protein, 13 aa, Prunus persica
YTLIEGDALGDTL

SEQ ID NO: 9813 - protein, 13 aa, Corylus avellana
PAARLFKSYVLDG

SEQ ID NO: 9814 - protein, 13 aa, Ostrya carpinifolia
PAARLFKSYVLDG

SEQ ID NO: 9815 - protein, 13 aa, Carpinus betulus
PAARLFKSYVLDG

SEQ ID NO: 9816 - protein, 13 aa, Betula verrucosa
GDTLEKISNEIKI

SEQ ID NO: 9817 - protein, 13 aa, Carpinus betulus
SHELKIVAAPGGG

SEQ ID NO: 9818 - protein, 13 aa, Ostrya carpinifolia
SHELKIVAAPGGG

SEQ ID NO: 9819 - protein, 13 aa, Ostrya carpinifolia
DHEVNAEEMKGAK

SEQ ID NO: 9820 - protein, 13 aa, Alnus glutinosa
TFPEGSPFKYVKE

SEQ ID NO: 9821 - protein, 13 aa, Ostrya carpinifolia
KVSHELKIVAAPG

SEQ ID NO: 9822 - protein, 13 aa, Carpinus betulus
KVSHELKIVAAPG

SEQ ID NO: 9823 - protein, 13 aa, Quercus alba
IQKVLPQAIKSTE

SEQ ID NO: 9824 - protein, 13 aa, Ostrya carpinifolia
ITFAEGSPFKFVK

SEQ ID NO: 9825 - protein, 13 aa, Ostrya carpinifolia
AKGDHEVNAEEMK

SEQ ID NO: 9826 - protein, 13 aa, Carpinus betulus
YVLDGDKLIPKVA

SEQ ID NO: 9827 - protein, 13 aa, Ostrya carpinifolia
YVLDGDKLIPKVA

SEQ ID NO: 9828 - protein, 13 aa, Corylus avellana
YVLDGDKLIPKVA

SEQ ID NO: 9829 - protein, 13 aa, Pyrus communis
HGLFKLIESYLKD

SEQ ID NO: 9830 - protein, 13 aa, Malus domestica
HGLFKLIESYLKD

SEQ ID NO: 9831 - protein, 13 aa, Alnus glutinosa
PSVIPAARLFKAF

SEQ ID NO: 9832 - protein, 13 aa, Betula verrucosa
AARLFKAFILDGD

SEQ ID NO: 9833 - protein, 13 aa, Alnus glutinosa
AARLFKAFILDGD

SEQ ID NO: 9834 - protein, 13 aa, Fragaria ananassa
LFKLIEGYLKDHP

SEQ ID NO: 9835 - protein, 13 aa, Apium graveolens
PGTLKIITLPDGG

SEQ ID NO: 9836 - protein, 13 aa, Corylus avellana
RAVETYLLAHSAE

SEQ ID NO: 9837 - protein, 13 aa, Carpinus betulus
RAVESYLLAHTAE

SEQ ID NO: 9838 - protein, 13 aa, Ostrya carpinifolia
RAVESYLLAHTAE

SEQ ID NO: 9839 - protein, 13 aa, Corylus avellana
HAKGDHEINAEEM

SEQ ID NO: 9840 - protein, 13 aa, Carpinus betulus
DKLEKVSHELKIV

SEQ ID NO: 9841 - protein, 13 aa, Ostrya carpinifolia
DKLEKVSHELKIV

SEQ ID NO: 9842 - protein, 13 aa, Pyrus communis
LTDTIEKISYEAK

SEQ ID NO: 9843 - protein, 13 aa, Ostrya carpinifolia
AVESYLLAHTAEY

SEQ ID NO: 9844 - protein, 13 aa, Carpinus betulus
AVESYLLAHTAEY

SEQ ID NO: 9845 - protein, 13 aa, Betula verrucosa
APQAISSVENIEG

SEQ ID NO: 9846 - protein, 13 aa, Vigna radiata
SFQSVEIVEGNGG

SEQ ID NO: 9847 - protein, 13 aa, Pyrus communis
TDTIEKISYEAKL

SEQ ID NO: 9848 - protein, 13 aa, Corylus avellana
YKYVKERVDEVDN

SEQ ID NO: 9849 - protein, 13 aa, Carpinus betulus
AKEMAEKLLRAVE

SEQ ID NO: 9850 - protein, 13 aa, Ostrya carpinifolia
AKEMAEKLLRAVE

SEQ ID NO: 9851 - protein, 13 aa, Corylus avellana
AKEMAEKLLRAVE

SEQ ID NO: 9852 - protein, 13 aa, Vigna radiata
LIEGDGGVGTILI

SEQ ID NO: 9853 - protein, 13 aa, Morus alba
GLFKLVEGYLEAN

SEQ ID NO: 9854 - protein, 13 aa, Morus bombycis
GLFKLVEGYLEAN

SEQ ID NO: 9855 - protein, 13 aa, Corylus avellana
PQAITSVENVEGN

SEQ ID NO: 9856 - protein, 13 aa, Morus bombycis
GTVKKITLPDGKY

SEQ ID NO: 9857 - protein, 13 aa, Morus alba
GTVKKITLPDGKY

SEQ ID NO: 9858 - protein, 13 aa, Quercus alba
YSFSVIEGDALTV

SEQ ID NO: 9859 - protein, 13 aa, Carpinus betulus
KSYVLDGDKLIPK

SEQ ID NO: 9860 - protein, 13 aa, Ostrya carpinifolia
KSYVLDGDKLIPK

SEQ ID NO: 9861 - protein, 13 aa, Corylus avellana
KSYVLDGDKLIPK

SEQ ID NO: 9862 - protein, 13 aa, Carpinus betulus
VLDGDKLIPKVAP

SEQ ID NO: 9863 - protein, 13 aa, Corylus avellana
VLDGDKLIPKVAP

SEQ ID NO: 9864 - protein, 13 aa, Ostrya carpinifolia
VLDGDKLIPKVAP

SEQ ID NO: 9865 - protein, 13 aa, Betula platyphylla
LGDTLEKISYEIK

SEQ ID NO: 9866 - protein, 13 aa, Carpinus betulus
EGIPFKFVKERVD

SEQ ID NO: 9867 - protein, 13 aa, Ostrya carpinifolia
ARLFKSYVLDGDK

SEQ ID NO: 9868 - protein, 13 aa, Corylus avellana
ARLFKSYVLDGDK

SEQ ID NO: 9869 - protein, 13 aa, Carpinus betulus
ARLFKSYVLDGDK

SEQ ID NO: 9870 - protein, 13 aa, Ostrya carpinifolia
EMKGAKEMAEKLL

SEQ ID NO: 9871 - protein, 13 aa, Corylus avellana
EMKGAKEMAEKLL

SEQ ID NO: 9872 - protein, 13 aa, Betula verrucosa
SNEIKIVATPDGG

SEQ ID NO: 9873 - protein, 13 aa, Carpinus betulus
GYHEVNAEKMKGA

SEQ ID NO: 9874 - protein, 13 aa, Fagus sylvatica
KSTSKYHTKGDHE

SEQ ID NO: 9875 - protein, 13 aa, Betula verrucosa
IGDTLEKISNEIK

SEQ ID NO: 9876 - protein, 13 aa, Carpinus betulus
FAEGIPFKFVKER

SEQ ID NO: 9877 - protein, 13 aa, Carpinus betulus
MKGAKEMAEKLLR

SEQ ID NO: 9878 - protein, 13 aa, Ostrya carpinifolia
MKGAKEMAEKLLR

SEQ ID NO: 9879 - protein, 13 aa, Corylus avellana
MKGAKEMAEKLLR

SEQ ID NO: 9880 - protein, 13 aa, Corylus avellana
KFHAKGDHEINAE

SEQ ID NO: 9881 - protein, 13 aa, Corylus avellana
AVETYLLAHSAEY

SEQ ID NO: 9882 - protein, 13 aa, Actinidia chinensis
ISYHIKIVACPDG

SEQ ID NO: 9883 - protein, 13 aa, Corylus avellana
TYSYTVIEGDVLG

SEQ ID NO: 9884 - protein, 13 aa, Corylus avellana
VCHELKIVAAPGG

SEQ ID NO: 9885 - protein, 13 aa, Malus domestica
YTLIEGDALTDTI

SEQ ID NO: 9886 - protein, 13 aa, Ostrya carpinifolia
KLEKVSHELKIVA

SEQ ID NO: 9887 - protein, 13 aa, Carpinus betulus
KLEKVSHELKIVA

SEQ ID NO: 9888 - protein, 13 aa, Corylus avellana
RYKYVKERVDEVD

SEQ ID NO: 9889 - protein, 13 aa, Corylus avellana
SVIPAARLFKSYV

SEQ ID NO: 9890 - protein, 13 aa, Ostrya carpinifolia
SVIPAARLFKSYV

SEQ ID NO: 9891 - protein, 13 aa, Carpinus betulus
SVIPAARLFKSYV

SEQ ID NO: 9892 - protein, 12 aa, Rubus idaeus
DGKERAAGLFKI

SEQ ID NO: 9893 - protein, 13 aa, Ostrya carpinifolia
AEGSPFKFVKERV

SEQ ID NO: 9894 - protein, 13 aa, Carpinus betulus
GIPFKFVKERVDE

SEQ ID NO: 9895 - protein, 13 aa, Morus bombycis
GVFTFDDEFTSTV

SEQ ID NO: 9896 - protein, 13 aa, Betula platyphylla
TSVIAPARLFKSF

SEQ ID NO: 9897 - protein, 13 aa, Daucus carota
TALFKAIEAYLIA

SEQ ID NO: 9898 - protein, 13 aa, Ostrya carpinifolia
FAEGSPFKFVKER

SEQ ID NO: 9899 - protein, 13 aa, Corylus avellana
VIPAARLFKSYVL

SEQ ID NO: 9900 - protein, 13 aa, Ostrya carpinifolia
VIPAARLFKSYVL

SEQ ID NO: 9901 - protein, 13 aa, Carpinus betulus
VIPAARLFKSYVL

SEQ ID NO: 9902 - protein, 13 aa, Corylus avellana
KEMAEKLLRAVET

SEQ ID NO: 9903 - protein, 13 aa, Alnus glutinosa
FILDGDKLLPKVA

SEQ ID NO: 9904 - protein, 13 aa, Fragaria ananassa
HLFKLIEGYLKDH

SEQ ID NO: 9905 - protein, 13 aa, Arachis hypogaea
GVFTFEDEITSTV

SEQ ID NO: 9906 - protein, 13 aa, Carpinus betulus
GAKEMAEKLLRAV

SEQ ID NO: 9907 - protein, 13 aa, Ostrya carpinifolia
GAKEMAEKLLRAV

SEQ ID NO: 9908 - protein, 13 aa, Corylus avellana
GAKEMAEKLLRAV

SEQ ID NO: 9909 - protein, 13 aa, Alnus glutinosa
KITFPEGSPFKYV

SEQ ID NO: 9910 - protein, 13 aa, Castanea sativa
ATGLFKAVEAYLL

SEQ ID NO: 9911 - protein, 13 aa, Betula verrucosa
QAISSVENIEGNG

SEQ ID NO: 9912 - protein, 13 aa, Carpinus betulus
KEMAEKLLRAVES

SEQ ID NO: 9913 - protein, 13 aa, Ostrya carpinifolia
KEMAEKLLRAVES

SEQ ID NO: 9914 - protein, 13 aa, Prunus avium
AAGLFKLVEAYLL

SEQ ID NO: 9915 - protein, 13 aa, Ostrya carpinifolia
EGSPFKFVKERVD

SEQ ID NO: 9916 - protein, 13 aa, Carpinus betulus
TFAEGIPFKFVKE

SEQ ID NO: 9917 - protein, 13 aa, Corylus avellana
DHEINAEEMKGAK

SEQ ID NO: 9918 - protein, 13 aa, Ostrya carpinifolia
TIKNITFAEGSPF

SEQ ID NO: 9919 - protein, 13 aa, Morus bombycis
KEGKEKAEGLFKL

SEQ ID NO: 9920 - protein, 13 aa, Morus alba
KEGKEKAEGLFKL

SEQ ID NO: 9921 - protein, 13 aa, Prunus persica
NLFKLIETYLKGH

SEQ ID NO: 9922 - protein, 13 aa, Prunus persica
NLFKLIETYLKGH

SEQ ID NO: 9923 - protein, 13 aa, Carpinus betulus
IPFKFVKERVDEV

SEQ ID NO: 9924 - protein, 13 aa, Morus alba
AEGLFKLVEGYLE

SEQ ID NO: 9925 - protein, 13 aa, Morus bombycis
AEGLFKLVEGYLE

SEQ ID NO: 9926 - protein, 13 aa, Prunus persica
YTLIEGDALGDNL

SEQ ID NO: 9927 - protein, 13 aa, Carpinus betulus
KGYHEVNAEKMKG

SEQ ID NO: 9928 - protein, 13 aa, Ostrya carpinifolia
TFAEGSPFKFVKE

SEQ ID NO: 9929 - protein, 13 aa, Ostrya carpinifolia
HEVNAEEMKGAKE

SEQ ID NO: 9930 - protein, 13 aa, Prunus avium
TYETEFTSVIPPE

SEQ ID NO: 9931 - protein, 13 aa, Fagus sylvatica
GKEEASGIFKAVE

SEQ ID NO: 9932 - protein, 13 aa, Ostrya carpinifolia
KGDHEVNAEEMKG

SEQ ID NO: 9933 - protein, 13 aa, Corylus avellana
KGDHEINAEEMKG

SEQ ID NO: 9934 - protein, 13 aa, Morus alba
HVTKFVASSSGGS

SEQ ID NO: 9935 - protein, 13 aa, Actinidia deliciosa
YHIKIVATPDGGC

SEQ ID NO: 9936 - protein, 13 aa, Betula verrucosa
TSVIPAARLFKAF

SEQ ID NO: 9937 - protein, 13 aa, Betula verrucosa
VAPQAISSVENIE

SEQ ID NO: 9938 - protein, 13 aa, Morus alba
PGTVKKITLPDGK

SEQ ID NO: 9939 - protein, 13 aa, Morus bombycis
PGTVKKITLPDGK

SEQ ID NO: 9940 - protein, 13 aa, Rubus idaeus
ALGDKIEKISYEI

SEQ ID NO: 9941 - protein, 13 aa, Ostrya carpinifolia
FHAKGDHEVNAEE

SEQ ID NO: 9942 - protein, 13 aa, Corylus avellana
DKLEKVCHELKIV

SEQ ID NO: 9943 - protein, 13 aa, Corylus avellana
CHELKIVAAPGGG

SEQ ID NO: 9944 - protein, 13 aa, Vigna radiata
QLIEGDGGVGTIL

SEQ ID NO: 9945 - protein, 13 aa, Carpinus betulus
AEGIPFKFVKERV

SEQ ID NO: 9946 - protein, 13 aa, Ostrya carpinifolia
SPFKFVKERVDEV

SEQ ID NO: 9947 - protein, 13 aa, Betula verrucosa
GGSILKISNKYHT

SEQ ID NO: 9948 - protein, 13 aa, Corylus avellana
QAITSVENVEGNG

SEQ ID NO: 9949 - protein, 13 aa, Actinidia deliciosa
LEGDGGVGTIKLT

SEQ ID NO: 9950 - protein, 13 aa, Corylus avellana
KLEKVCHELKIVA

SEQ ID NO: 9951 - protein, 13 aa, Carpinus betulus
KGAKEMAEKLLRA

SEQ ID NO: 9952 - protein, 13 aa, Ostrya carpinifolia
KGAKEMAEKLLRA

SEQ ID NO: 9953 - protein, 13 aa, Corylus avellana
KGAKEMAEKLLRA

SEQ ID NO: 9954 - protein, 13 aa, Apium graveolens
GTLKIITLPDGGP

SEQ ID NO: 9955 - protein, 13 aa, Juglans regia
DVKDGKEKASGLF

SEQ ID NO: 9956 - protein, 13 aa, Corylus avellana
FHAKGDHEINAEE

SEQ ID NO: 9957 - protein, 13 aa, Alnus glutinosa
KYVKERVDEVDRV

SEQ ID NO: 9958 - protein, 13 aa, Corylus avellana
GDKLEKVCHELKI

SEQ ID NO: 9959 - protein, 13 aa, Ostrya carpinifolia
YNYTVIEGDVLGD

SEQ ID NO: 9960 - protein, 13 aa, Carpinus betulus
YNYTVIEGDVLGD

SEQ ID NO: 9961 - protein, 13 aa, Ostrya carpinifolia
KFHAKGDHEVNAE

SEQ ID NO: 9962 - protein, 13 aa, Betula verrucosa
GGPIGDTLEKISN

SEQ ID NO: 9963 - protein, 13 aa, Carpinus betulus
AKGYHEVNAEKMK

SEQ ID NO: 9964 - protein, 13 aa, Carpinus betulus
YHEVNAEKMKGAK

SEQ ID NO: 9965 - protein, 13 aa, Quercus alba
LIQKVLPQAIKST

SEQ ID NO: 9966 - protein, 13 aa, Daucus carota
NTALFKAIEAYLI

SEQ ID NO: 9967 - protein, 13 aa, Actinidia deliciosa
QTLEGDGGVGTIK

SEQ ID NO: 9968 - protein, 13 aa, Corylus avellana
SYTVIEGDVLGDK

SEQ ID NO: 9969 - protein, 13 aa, Carpinus betulus
FKFVKERVDEVDN

SEQ ID NO: 9970 - protein, 13 aa, Carpinus betulus
FHAKGYHEVNAEK

SEQ ID NO: 9971 - protein, 13 aa, Morus bombycis
AAKSAETVEGNGG

SEQ ID NO: 9972 - protein, 13 aa, Morus alba
AAKSAETVEGNGG

SEQ ID NO: 9973 - protein, 13 aa, Castanea sativa
PQAIKSTEIIEGN

SEQ ID NO: 9974 - protein, 13 aa, Quercus alba
PQAIKSTEIIEGN

SEQ ID NO: 9975 - protein, 13 aa, Corylus avellana
APQAITSVENVEG

SEQ ID NO: 9976 - protein, 13 aa, Carpinus betulus
GDKLEKVSHELKI

SEQ ID NO: 9977 - protein, 13 aa, Ostrya carpinifolia
GDKLEKVSHELKI

SEQ ID NO: 9978 - protein, 13 aa, Alnus glutinosa
KKITFPEGSPFKY

SEQ ID NO: 9979 - protein, 13 aa, Betula verrucosa
DTLEKISNEIKIV

SEQ ID NO: 9980 - protein, 13 aa, Apium graveolens
GPGTLKIITLPDG

SEQ ID NO: 9981 - protein, 13 aa, Alnus glutinosa
FPEGSPFKYVKER

SEQ ID NO: 9982 - protein, 13 aa, Apium graveolens
TALFKALEAYLIA

SEQ ID NO: 9983 - protein, 13 aa, Betula verrucosa
NFKYNYSVIEGGP

SEQ ID NO: 9984 - protein, 13 aa, Carpinus betulus
SYVLDGDKLIPKV

SEQ ID NO: 9985 - protein, 13 aa, Corylus avellana
SYVLDGDKLIPKV

SEQ ID NO: 9986 - protein, 13 aa, Ostrya carpinifolia
SYVLDGDKLIPKV

SEQ ID NO: 9987 - protein, 13 aa, Corylus avellana
YSYTVIEGDVLGD

SEQ ID NO: 9988 - protein, 13 aa, Betula verrucosa
NEIKIVATPDGGS

SEQ ID NO: 9989 - protein, 13 aa, Solanum lycopersicum
KAVEAYLLANPSV

SEQ ID NO: 9990 - protein, 13 aa, Corylus avellana
KVCHELKIVAAPG

SEQ ID NO: 9991 - protein, 13 aa, Solanum lycopersicum
RLFKALVLDFDNL

SEQ ID NO: 9992 - protein, 13 aa, Ostrya carpinifolia
GSPFKFVKERVDE

SEQ ID NO: 9993 - protein, 13 aa, Carpinus betulus
VSHELKIVAAPGG

SEQ ID NO: 9994 - protein, 13 aa, Ostrya carpinifolia
VSHELKIVAAPGG

SEQ ID NO: 9995 - protein, 13 aa, Alnus glutinosa
IKKITFPEGSPFK

SEQ ID NO: 9996 - protein, 13 aa, Carpinus betulus
KMKGAKEMAEKLL

SEQ ID NO: 9997 - protein, 13 aa, Vigna radiata
LFKAVEAYLLANP

SEQ ID NO: 9998 - protein, 13 aa, Corylus avellana
HEINAEEMKGAKE

SEQ ID NO: 9999 - protein, 13 aa, Carpinus betulus
PSVIPAARLFKSY

SEQ ID NO: 10000 - protein, 13 aa, Ostrya carpinifolia
PSVIPAARLFKSY

SEQ ID NO: 10001 - protein, 13 aa, Corylus avellana
PSVIPAARLFKSY

SEQ ID NO: 10002 - protein, 13 aa, Alnus glutinosa
AVESYLLAHSDAY

SEQ ID NO: 10003 - protein, 13 aa, Ostrya carpinifolia
KYNYTVIEGDVLG

SEQ ID NO: 10004 - protein, 13 aa, Carpinus betulus
KYNYTVIEGDVLG

SEQ ID NO: 10005 - protein, 13 aa, Quercus alba
QKVLPQAIKSTEI

SEQ ID NO: 10006 - protein, 13 aa, Ostrya carpinifolia
YTVIEGDVLGDKL

SEQ ID NO: 10007 - protein, 13 aa, Corylus avellana
YTVIEGDVLGDKL

SEQ ID NO: 10008 - protein, 13 aa, Carpinus betulus
YTVIEGDVLGDKL

SEQ ID NO: 10009 - protein, 13 aa, Solanum lycopersicum
IEGDGGVGSIKQM

SEQ ID NO: 10010 - protein, 13 aa, Alnus glutinosa
GDHEINAEQIKIE

SEQ ID NO: 10011 - protein, 13 aa, Corylus avellana
VAPQAITSVENVE

SEQ ID NO: 10012 - protein, 13 aa, Ostrya carpinifolia
FKSYVLDGDKLIP

SEQ ID NO: 10013 - protein, 13 aa, Corylus avellana
FKSYVLDGDKLIP

SEQ ID NO: 10014 - protein, 13 aa, Carpinus betulus
FKSYVLDGDKLIP

SEQ ID NO: 10015 - protein, 13 aa, Carpinus betulus
EVNAEKMKGAKEM

SEQ ID NO: 10016 - protein, 13 aa, Carpinus betulus
TIKNITFAEGIPF

SEQ ID NO: 10017 - protein, 13 aa, Quercus alba
SPDGGSIMKSTTK

SEQ ID NO: 10018 - protein, 13 aa, Fragaria ananassa
AHLFKLIEGYLKD

SEQ ID NO: 10019 - protein, 13 aa, Ostrya carpinifolia
HAKGDHEVNAEEM

SEQ ID NO: 10020 - protein, 13 aa, Betula verrucosa
EGGPIGDTLEKIS

SEQ ID NO: 10021 - protein, 13 aa, Actinidia deliciosa
GKERASGIFKKVE

SEQ ID NO: 10022 - protein, 13 aa, Betula verrucosa
GPIGDTLEKISNE

SEQ ID NO: 10023 - protein, 13 aa, Prunus avium
FTSVIPPEKLFKA

SEQ ID NO: 10024 - protein, 13 aa, Quercus alba
AIEKAAGLLKAVE

SEQ ID NO: 10025 - protein, 13 aa, Prunus persica
TYESEFTSEIPPP

SEQ ID NO: 10026 - protein, 13 aa, Prunus persica
TYESEFTSEIPPP

SEQ ID NO: 10027 - protein, 13 aa, Carpinus betulus
LFKSYVLDGDKLI

SEQ ID NO: 10028 - protein, 13 aa, Corylus avellana
LFKSYVLDGDKLI

SEQ ID NO: 10029 - protein, 13 aa, Ostrya carpinifolia
LFKSYVLDGDKLI

SEQ ID NO: 10030 - protein, 13 aa, Actinidia deliciosa
ISYHIKIVATPDG

SEQ ID NO: 10031 - protein, 13 aa, Corylus avellana
IPAARLFKSYVLD

SEQ ID NO: 10032 - protein, 13 aa, Ostrya carpinifolia
IPAARLFKSYVLD

SEQ ID NO: 10033 - protein, 13 aa, Carpinus betulus
IPAARLFKSYVLD

SEQ ID NO: 10034 - protein, 13 aa, Morus alba
GPGTVKKITLPDG

SEQ ID NO: 10035 - protein, 13 aa, Morus bombycis
GPGTVKKITLPDG

SEQ ID NO: 10036 - protein, 13 aa, Alnus glutinosa
GGSILKISNKFHT

SEQ ID NO: 10037 - protein, 13 aa, Morus alba
VFTFDDEFPSTVA

SEQ ID NO: 10038 - protein, 13 aa, Actinidia chinensis
YHIKIVACPDGGS

SEQ ID NO: 10039 - protein, 13 aa, Morus bombycis
HVTKFVASPSGGS

SEQ ID NO: 10040 - protein, 13 aa, Alnus glutinosa
FKAFILDGDKLLP

SEQ ID NO: 10041 - protein, 13 aa, Quercus alba
SDNLIQKVLPQAI

SEQ ID NO: 10042 - protein, 13 aa, Carpinus betulus
KISSKFHAKGYHE

SEQ ID NO: 10043 - protein, 13 aa, Juglans regia
PQAVKSSEIIEGN

SEQ ID NO: 10044 - protein, 13 aa, Apium graveolens
DTVLPKAAPGAYK

SEQ ID NO: 10045 - protein, 13 aa, Glycine max
LKTGKAKADALFK

SEQ ID NO: 10046 - protein, 13 aa, Carpinus betulus
DNANFKYNYTVIE

SEQ ID NO: 10047 - protein, 13 aa, Ostrya carpinifolia
DNANFKYNYTVIE

SEQ ID NO: 10048 - protein, 13 aa, Castanea sativa
ALDPENCTYSFSV

SEQ ID NO: 10049 - protein, 13 aa, Quercus alba
ALDPENCTYSFSV

SEQ ID NO: 10050 - protein, 13 aa, Carpinus betulus
VISSVENVGGNGG

SEQ ID NO: 10051 - protein, 13 aa, Betula verrucosa
GFPFKYVKDRVDE

SEQ ID NO: 10052 - protein, 13 aa, Apium graveolens
VLPKAAPGAYKSV

SEQ ID NO: 10053 - protein, 13 aa, Actinidia deliciosa
KAGKERASGIFKK

SEQ ID NO: 10054 - protein, 13 aa, Ostrya carpinifolia
QAISKVENVGGNG

SEQ ID NO: 10055 - protein, 13 aa, Morus alba
EFPSTVAPARFFK

SEQ ID NO: 10056 - protein, 13 aa, Betula verrucosa
IEGGPIGDTLEKI

SEQ ID NO: 10057 - protein, 13 aa, Betula verrucosa
TIKKISFPEGFPF

SEQ ID NO: 10058 - protein, 13 aa, Quercus alba
NCTYSFSVIEGDA

SEQ ID NO: 10059 - protein, 13 aa, Actinidia deliciosa
IKAGKERASGIFK

SEQ ID NO: 10060 - protein, 13 aa, Apium graveolens
TVLPKAAPGAYKS

SEQ ID NO: 10061 - protein, 13 aa, Betula verrucosa
PEGFPFKYVKDRV

SEQ ID NO: 10062 - protein, 13 aa, Apium graveolens
PTADGGSICKTTA

SEQ ID NO: 10063 - protein, 13 aa, Castanea sativa
ENCTYSFSVIEGD

SEQ ID NO: 10064 - protein, 13 aa, Quercus alba
ENCTYSFSVIEGD

SEQ ID NO: 10065 - protein, 13 aa, Betula platyphylla
NVSSAENIEGNGG

SEQ ID NO: 10066 - protein, 13 aa, Quercus alba
TYSFSVIEGDALT

SEQ ID NO: 10067 - protein, 13 aa, Morus alba
KQRLDSIDHDNFT

SEQ ID NO: 10068 - protein, 13 aa, Morus bombycis
KQRLDSIDHDNFT

SEQ ID NO: 10069 - protein, 13 aa, Apium graveolens
TADGGSICKTTAI

SEQ ID NO: 10070 - protein, 13 aa, Vigna radiata
GTIKKISFVEDGE

SEQ ID NO: 10071 - protein, 13 aa, Malus domestica
TFENEFTSEIPPS

SEQ ID NO: 10072 - protein, 13 aa, Ostrya carpinifolia
NITFAEGSPFKFV

SEQ ID NO: 10073 - protein, 13 aa, Betula verrucosa
PFKYVKDRVDEVD

SEQ ID NO: 10074 - protein, 13 aa, Morus alba
HTVGNAPVDEAKA

SEQ ID NO: 10075 - protein, 13 aa, Daucus carota
AIFHTKGDAVVPE

SEQ ID NO: 10076 - protein, 13 aa, Apium graveolens
AIFHTKGDAVVPE

SEQ ID NO: 10077 - protein, 13 aa, Carpinus betulus
APQVISSVENVGG

SEQ ID NO: 10078 - protein, 13 aa, Rubus idaeus
GLDKVNFVYSYSI

SEQ ID NO: 10079 - protein, 13 aa, Betula verrucosa
KKISFPEGFPFKY

SEQ ID NO: 10080 - protein, 13 aa, Prunus avium
TEFTSVIPPEKLF

SEQ ID NO: 10081 - protein, 13 aa, Daucus carota
PTADGGSITKTTA

SEQ ID NO: 10082 - protein, 13 aa, Carpinus betulus
DEVDNANFKYNYT

SEQ ID NO: 10083 - protein, 13 aa, Ostrya carpinifolia
DEVDNANFKYNYT

SEQ ID NO: 10084 - protein, 13 aa, Ostrya carpinifolia
RVDEVDNANFKYN

SEQ ID NO: 10085 - protein, 13 aa, Carpinus betulus
RVDEVDNANFKYN

SEQ ID NO: 10086 - protein, 13 aa, Morus bombycis
EFTSTVAPARFFK

SEQ ID NO: 10087 - protein, 13 aa, Morus bombycis
KVTTTFHTVGDAP

SEQ ID NO: 10088 - protein, 13 aa, Glycine max
KAKADALFKAIEA

SEQ ID NO: 10089 - protein, 13 aa, Fagus sylvatica
AYEIKLVASPDGG

SEQ ID NO: 10090 - protein, 13 aa, Castanea sativa
HESQETSVIPPAR

SEQ ID NO: 10091 - protein, 13 aa, Actinidia deliciosa
FTYSYSIIEGGAL

SEQ ID NO: 10092 - protein, 13 aa, Morus alba
AKAKEGKEKAEGL

SEQ ID NO: 10093 - protein, 13 aa, Morus bombycis
AKAKEGKEKAEGL

SEQ ID NO: 10094 - protein, 13 aa, Apium graveolens
VPTADGGSICKTT

SEQ ID NO: 10095 - protein, 13 aa, Betula verrucosa
PDGGSILKISNKY

SEQ ID NO: 10096 - protein, 13 aa, Morus alba
FKLVEGYLEANPS

SEQ ID NO: 10097 - protein, 13 aa, Morus bombycis
FKLVEGYLEANPS

SEQ ID NO: 10098 - protein, 13 aa, Ostrya carpinifolia
APQAISKVENVGG

SEQ ID NO: 10099 - protein, 13 aa, Corylus avellana
SRYKYVKERVDEV

SEQ ID NO: 10100 - protein, 13 aa, Betula platyphylla
ITFPEGSHFKYMK

SEQ ID NO: 10101 - protein, 13 aa, Apium graveolens
TTAIFHTKGDAVV

SEQ ID NO: 10102 - protein, 13 aa, Daucus carota
TTAIFHTKGDAVV

SEQ ID NO: 10103 - protein, 13 aa, Juglans regia
DKIEKISYETKIV

SEQ ID NO: 10104 - protein, 13 aa, Ostrya carpinifolia
PQAISKVENVGGN

SEQ ID NO: 10105 - protein, 13 aa, Apium graveolens
GGSICKTTAIFHT

SEQ ID NO: 10106 - protein, 13 aa, Betula platyphylla
KVAPENVSSAENI

SEQ ID NO: 10107 - protein, 13 aa, Castanea sativa
PENCTYSFSVIEG

SEQ ID NO: 10108 - protein, 13 aa, Quercus alba
PENCTYSFSVIEG

SEQ ID NO: 10109 - protein, 13 aa, Vigna radiata
LKAGKAKSDALFK

SEQ ID NO: 10110 - protein, 13 aa, Morus alba
TTFHTVGNAPVDE

SEQ ID NO: 10111 - protein, 13 aa, Betula verrucosa
KISFPEGFPFKYV

SEQ ID NO: 10112 - protein, 13 aa, Betula verrucosa
EGFPFKYVKDRVD

SEQ ID NO: 10113 - protein, 13 aa, Betula platyphylla
ANFKYCYSIIEGG

SEQ ID NO: 10114 - protein, 13 aa, Betula verrucosa
ISNEIKIVATPDG

SEQ ID NO: 10115 - protein, 13 aa, Castanea sativa
TETKFVASPDGGT

SEQ ID NO: 10116 - protein, 13 aa, Betula platyphylla
TLEKISYEIKIVA

SEQ ID NO: 10117 - protein, 13 aa, Morus bombycis
TSTVAPARFFKAA

SEQ ID NO: 10118 - protein, 13 aa, Castanea sativa
ESQETSVIPPARL

SEQ ID NO: 10119 - protein, 13 aa, Betula verrucosa
FPFKYVKDRVDEV

SEQ ID NO: 10120 - protein, 13 aa, Morus alba
AKEGKEKAEGLFK

SEQ ID NO: 10121 - protein, 13 aa, Morus bombycis
AKEGKEKAEGLFK

SEQ ID NO: 10122 - protein, 13 aa, Fagus sylvatica
EASGIFKAVEAYL

SEQ ID NO: 10123 - protein, 13 aa, Morus alba
FHTVGNAPVDEAK

SEQ ID NO: 10124 - protein, 13 aa, Apium graveolens
LVPTADGGSICKT

SEQ ID NO: 10125 - protein, 13 aa, Daucus carota
KTTAIFHTKGDAV

SEQ ID NO: 10126 - protein, 13 aa, Castanea sativa
DGGTIMKSTTKYQ

SEQ ID NO: 10127 - protein, 13 aa, Daucus carota
KAAPGAYKSVDVK

SEQ ID NO: 10128 - protein, 13 aa, Morus alba
FPSTVAPARFFKA

SEQ ID NO: 10129 - protein, 13 aa, Prunus persica
KEKASNLFKLIET

SEQ ID NO: 10130 - protein, 13 aa, Prunus persica
KEKASNLFKLIET

SEQ ID NO: 10131 - protein, 13 aa, Morus bombycis
IIKVTTTFHTVGD

SEQ ID NO: 10132 - protein, 13 aa, Betula verrucosa
IKKISFPEGFPFK

SEQ ID NO: 10133 - protein, 13 aa, Actinidia deliciosa
DGGCICKNRSIYT

SEQ ID NO: 10134 - protein, 13 aa, Daucus carota
QNTALFKAIEAYL

SEQ ID NO: 10135 - protein, 13 aa, Carpinus betulus
QVISSVENVGGNG

SEQ ID NO: 10136 - protein, 13 aa, Fagus sylvatica
IAYEIKLVASPDG

SEQ ID NO: 10137 - protein, 13 aa, Morus alba
APARFFKAAVLDA

SEQ ID NO: 10138 - protein, 13 aa, Morus bombycis
APARFFKAAVLDA

SEQ ID NO: 10139 - protein, 13 aa, Betula verrucosa
FKYVKDRVDEVDH

SEQ ID NO: 10140 - protein, 13 aa, Morus alba
PKVAPQAAKSAET

SEQ ID NO: 10141 - protein, 13 aa, Morus bombycis
PKVAPQAAKSAET

SEQ ID NO: 10142 - protein, 13 aa, Daucus carota
FHTKGDAVVPEEN

SEQ ID NO: 10143 - protein, 13 aa, Apium graveolens
FHTKGDAVVPEEN

SEQ ID NO: 10144 - protein, 13 aa, Actinidia deliciosa
ERASGIFKKVEAY

SEQ ID NO: 10145 - protein, 13 aa, Glycine max
DALFKAIEAYLLA

SEQ ID NO: 10146 - protein, 13 aa, Betula platyphylla
LEKISYEIKIVAA

SEQ ID NO: 10147 - protein, 13 aa, Ostrya carpinifolia
ISKVENVGGNGGP

SEQ ID NO: 10148 - protein, 13 aa, Actinidia chinensis
CPDGGSICKNRSI

SEQ ID NO: 10149 - protein, 13 aa, Apium graveolens
IDVDTVLPKAAPG

SEQ ID NO: 10150 - protein, 13 aa, Apium graveolens
CKTTAIFHTKGDA

SEQ ID NO: 10151 - protein, 13 aa, Malus domestica
KAHGLFKLIESYL

SEQ ID NO: 10152 - protein, 13 aa, Pyrus communis
KAHGLFKLIESYL

SEQ ID NO: 10153 - protein, 13 aa, Morus alba
TFHTVGNAPVDEA

SEQ ID NO: 10154 - protein, 13 aa, Daucus carota
VVPTADGGSITKT

SEQ ID NO: 10155 - protein, 13 aa, Ostrya carpinifolia
ANFKYNYTVIEGD

SEQ ID NO: 10156 - protein, 13 aa, Carpinus betulus
ANFKYNYTVIEGD

SEQ ID NO: 10157 - protein, 13 aa, Morus bombycis
PQAAKSAETVEGN

SEQ ID NO: 10158 - protein, 13 aa, Morus alba
PQAAKSAETVEGN

SEQ ID NO: 10159 - protein, 13 aa, Prunus avium
AYDIKLVASPDGG

SEQ ID NO: 10160 - protein, 13 aa, Quercus alba
SQETSVIAPARLF

SEQ ID NO: 10161 - protein, 13 aa, Betula platyphylla
VAPENVSSAENIE

SEQ ID NO: 10162 - protein, 13 aa, Castanea sativa
NCTYSFSVIEGDV

SEQ ID NO: 10163 - protein, 13 aa, Apium graveolens
KAAPGAYKSVEIK

SEQ ID NO: 10164 - protein, 13 aa, Actinidia deliciosa
YSYSIIEGGALDV

SEQ ID NO: 10165 - protein, 13 aa, Castanea sativa
FTHESQETSVIPP

SEQ ID NO: 10166 - protein, 13 aa, Prunus persica
ASNLFKLIETYLK

SEQ ID NO: 10167 - protein, 13 aa, Prunus persica
ASNLFKLIETYLK

SEQ ID NO: 10168 - protein, 13 aa, Prunus persica
SNLFKLIETYLKG

SEQ ID NO: 10169 - protein, 13 aa, Prunus persica
SNLFKLIETYLKG

SEQ ID NO: 10170 - protein, 13 aa, Fagus sylvatica
KIAYEIKLVASPD

SEQ ID NO: 10171 - protein, 13 aa, Daucus carota
ADGGSITKTTAIF

SEQ ID NO: 10172 - protein, 13 aa, Juglans regia
YETESTSVIPPAR

SEQ ID NO: 10173 - protein, 13 aa, Fragaria ananassa
IPAPKLFKAFVLD

SEQ ID NO: 10174 - protein, 13 aa, Apium graveolens
SICKTTAIFHTKG

SEQ ID NO: 10175 - protein, 13 aa, Morus alba
IKVTTTFHTVGNA

SEQ ID NO: 10176 - protein, 13 aa, Glycine max
GTIKKITFLEDGE

SEQ ID NO: 10177 - protein, 13 aa, Daucus carota
VIPKAAPGAYKSV

SEQ ID NO: 10178 - protein, 13 aa, Betula platyphylla
GLFKAVENYLVAH

SEQ ID NO: 10179 - protein, 13 aa, Betula verrucosa
ISNKYHTKGDHEV

SEQ ID NO: 10180 - protein, 13 aa, Corylus avellana
TNFTYSYTVIEGD

SEQ ID NO: 10181 - protein, 13 aa, Morus bombycis
FHTVGDAPVDEAK

SEQ ID NO: 10182 - protein, 13 aa, Morus bombycis
FKAAVLDADNLFP

SEQ ID NO: 10183 - protein, 13 aa, Morus alba
FKAAVLDADNLFP

SEQ ID NO: 10184 - protein, 13 aa, Daucus carota
GDILLEFIESIET

SEQ ID NO: 10185 - protein, 13 aa, Glycine max
GKLTVKYETKGDA

SEQ ID NO: 10186 - protein, 13 aa, Daucus carota
DGGSITKTTAIFH

SEQ ID NO: 10187 - protein, 13 aa, Ostrya carpinifolia
VAPQAISKVENVG

SEQ ID NO: 10188 - protein, 13 aa, Betula platyphylla
KITFPEGSHFKYM

SEQ ID NO: 10189 - protein, 13 aa, Rubus idaeus
DGLDKVNFVYSYS

SEQ ID NO: 10190 - protein, 13 aa, Alnus glutinosa
EGSPFKYVKERVD

SEQ ID NO: 10191 - protein, 13 aa, Fagus sylvatica
EGSQFNYVKHRID

SEQ ID NO: 10192 - protein, 13 aa, Malus domestica
VYTFENEFTSEIP

SEQ ID NO: 10193 - protein, 13 aa, Castanea sativa
TIMKSTTKYQTKG

SEQ ID NO: 10194 - protein, 13 aa, Morus bombycis
VTKFVASPSGGSI

SEQ ID NO: 10195 - protein, 13 aa, Actinidia deliciosa
TPDGGCICKNRSI

SEQ ID NO: 10196 - protein, 13 aa, Glycine max
GKAKADALFKAIE

SEQ ID NO: 10197 - protein, 13 aa, Carpinus betulus
VDEVDNANFKYNY

SEQ ID NO: 10198 - protein, 13 aa, Ostrya carpinifolia
VDEVDNANFKYNY

SEQ ID NO: 10199 - protein, 13 aa, Carpinus betulus
KNITFAEGIPFKF

SEQ ID NO: 10200 - protein, 13 aa, Morus alba
IIKVTTTFHTVGN

SEQ ID NO: 10201 - protein, 13 aa, Morus alba
STVAPARFFKAAV

SEQ ID NO: 10202 - protein, 13 aa, Morus bombycis
STVAPARFFKAAV

SEQ ID NO: 10203 - protein, 13 aa, Apium graveolens
DVDTVLPKAAPGA

SEQ ID NO: 10204 - protein, 13 aa, Fragaria ananassa
TYSYSLIEGDALS

SEQ ID NO: 10205 - protein, 13 aa, Castanea sativa
TYSFSVIEGDVLT

SEQ ID NO: 10206 - protein, 13 aa, Apium graveolens
APGAYKSVEIKGD

SEQ ID NO: 10207 - protein, 13 aa, Alnus glutinosa
ITFPEGSPFKYVK

SEQ ID NO: 10208 - protein, 13 aa, Betula verrucosa
EKISNEIKIVATP

SEQ ID NO: 10209 - protein, 13 aa, Rubus idaeus
ISYEIKLVASGRG

SEQ ID NO: 10210 - protein, 13 aa, Daucus carota
PGAYKSVDVKGDG

SEQ ID NO: 10211 - protein, 13 aa, Morus bombycis
TFHTVGDAPVDEA

SEQ ID NO: 10212 - protein, 13 aa, Daucus carota
KGDAVVPEENIKF

SEQ ID NO: 10213 - protein, 13 aa, Quercus alba
SIMKSTTKYQTKG

SEQ ID NO: 10214 - protein, 13 aa, Quercus alba
AAIEKAAGLLKAV

SEQ ID NO: 10215 - protein, 13 aa, Daucus carota
GAYKSVDVKGDGG

SEQ ID NO: 10216 - protein, 13 aa, Apium graveolens
GAYKSVEIKGDGG

SEQ ID NO: 10217 - protein, 13 aa, Daucus carota
IDGDILLEFIESI

SEQ ID NO: 10218 - protein, 13 aa, Juglans regia
AVEGYLLAHPDAY

SEQ ID NO: 10219 - protein, 13 aa, Daucus carota
TVIDGDILLEFIE

SEQ ID NO: 10220 - protein, 13 aa, Betula platyphylla
IIEGGPLGDTLEK

SEQ ID NO: 10221 - protein, 13 aa, Juglans regia
TYAYSVIEGDALA

SEQ ID NO: 10222 - protein, 13 aa, Daucus carota
VDTVIPKAAPGAY

SEQ ID NO: 10223 - protein, 13 aa, Actinidia deliciosa
RASGIFKKVEAYL

SEQ ID NO: 10224 - protein, 13 aa, Morus bombycis
QRLDSIDHDNFTY

SEQ ID NO: 10225 - protein, 13 aa, Morus alba
QRLDSIDHDNFTY

SEQ ID NO: 10226 - protein, 13 aa, Morus alba
GGSIIKVTTTFHT

SEQ ID NO: 10227 - protein, 13 aa, Apium graveolens
GDILLGFIESIEN

SEQ ID NO: 10228 - protein, 13 aa, Morus bombycis
HTVGDAPVDEAKA

SEQ ID NO: 10229 - protein, 13 aa, Morus bombycis
VFTFDDEFTSTVA

SEQ ID NO: 10230 - protein, 13 aa, Vigna radiata
AKSDALFKAVEAY

SEQ ID NO: 10231 - protein, 13 aa, Carpinus betulus
IKNITFAEGIPFK

SEQ ID NO: 10232 - protein, 13 aa, Betula verrucosa
ATPDGGSILKISN

SEQ ID NO: 10233 - protein, 13 aa, Fagus sylvatica
KYHTKGDHEIKED

SEQ ID NO: 10234 - protein, 13 aa, Actinidia deliciosa
FESISYHIKIVAT

SEQ ID NO: 10235 - protein, 13 aa, Daucus carota
ITKTTAIFHTKGD

SEQ ID NO: 10236 - protein, 13 aa, Glycine max
DSFKSVENVEGNG

SEQ ID NO: 10237 - protein, 13 aa, Quercus alba
CTYSFSVIEGDAL

SEQ ID NO: 10238 - protein, 13 aa, Betula verrucosa
LEKISNEIKIVAT

SEQ ID NO: 10239 - protein, 13 aa, Prunus persica
LFKLIETYLKGHP

SEQ ID NO: 10240 - protein, 13 aa, Prunus persica
LFKLIETYLKGHP

SEQ ID NO: 10241 - protein, 13 aa, Apium graveolens
DAVVPEENIKYAN

SEQ ID NO: 10242 - protein, 13 aa, Actinidia deliciosa
SISYHIKIVATPD

SEQ ID NO: 10243 - protein, 13 aa, Vigna radiata
VQLIEGDGGVGTI

SEQ ID NO: 10244 - protein, 13 aa, Betula verrucosa
DGGSILKISNKYH

SEQ ID NO: 10245 - protein, 13 aa, Glycine max
TIKKITFLEDGET

SEQ ID NO: 10246 - protein, 13 aa, Pyrus communis
ISYEAKLVASGSG

SEQ ID NO: 10247 - protein, 13 aa, Daucus carota
IFHTKGDAVVPEE

SEQ ID NO: 10248 - protein, 13 aa, Apium graveolens
IFHTKGDAVVPEE

SEQ ID NO: 10249 - protein, 13 aa, Daucus carota
AAPGAYKSVDVKG

SEQ ID NO: 10250 - protein, 13 aa, Apium graveolens
GSICKTTAIFHTK

SEQ ID NO: 10251 - protein, 13 aa, Rubus idaeus
EIIEGDGGVGTVK

SEQ ID NO: 10252 - protein, 13 aa, Prunus avium
IAYDIKLVASPDG

SEQ ID NO: 10253 - protein, 13 aa, Glycine max
KKITFLEDGETKF

SEQ ID NO: 10254 - protein, 13 aa, Morus bombycis
LFPKVAPQAAKSA

SEQ ID NO: 10255 - protein, 13 aa, Morus alba
LFPKVAPQAAKSA

SEQ ID NO: 10256 - protein, 13 aa, Apium graveolens
DGDILLGFIESIE

SEQ ID NO: 10257 - protein, 13 aa, Apium graveolens
AAPGAYKSVEIKG

SEQ ID NO: 10258 - protein, 13 aa, Vigna radiata
GSFQSVEIVEGNG

SEQ ID NO: 10259 - protein, 13 aa, Daucus carota
TADGGSITKTTAI

SEQ ID NO: 10260 - protein, 13 aa, Daucus carota
VIDGDILLEFIES

SEQ ID NO: 10261 - protein, 13 aa, Fragaria ananassa
VYTYENEFTSDIP

SEQ ID NO: 10262 - protein, 13 aa, Quercus alba
HESQETSVIAPAR

SEQ ID NO: 10263 - protein, 13 aa, Actinidia deliciosa
ENFTYSYSIIEGG

SEQ ID NO: 10264 - protein, 13 aa, Daucus carota
DGDILLEFIESIE

SEQ ID NO: 10265 - protein, 13 aa, Daucus carota
TKTTAIFHTKGDA

SEQ ID NO: 10266 - protein, 13 aa, Castanea sativa
VASPDGGTIMKST

SEQ ID NO: 10267 - protein, 13 aa, Morus alba
VTTTFHTVGNAPV

SEQ ID NO: 10268 - protein, 13 aa, Castanea sativa
ASPDGGTIMKSTT

SEQ ID NO: 10269 - protein, 13 aa, Quercus alba
KKITFGEASKFKY

SEQ ID NO: 10270 - protein, 13 aa, Fagus sylvatica
AGKEEASGIFKAV

SEQ ID NO: 10271 - protein, 13 aa, Glycine max
AKADALFKAIEAY

SEQ ID NO: 10272 - protein, 13 aa, Ostrya carpinifolia
IKNITFAEGSPFK

SEQ ID NO: 10273 - protein, 13 aa, Alnus glutinosa
PAARLFKAFILDG

SEQ ID NO: 10274 - protein, 13 aa, Betula verrucosa
PAARLFKAFILDG

SEQ ID NO: 10275 - protein, 13 aa, Fagus sylvatica
ASGIFKAVEAYLL

SEQ ID NO: 10276 - protein, 13 aa, Apium graveolens
VDTVLPKAAPGAY

SEQ ID NO: 10277 - protein, 13 aa, Apium graveolens
VLELTSSVSAEKI

SEQ ID NO: 10278 - protein, 13 aa, Malus domestica
EKAHGLFKLIESY

SEQ ID NO: 10279 - protein, 13 aa, Pyrus communis
EKAHGLFKLIESY

SEQ ID NO: 10280 - protein, 13 aa, Malus domestica
YTFENEFTSEIPP

SEQ ID NO: 10281 - protein, 13 aa, Apium graveolens
IDGDILLGFIESI

SEQ ID NO: 10282 - protein, 13 aa, Fragaria ananassa
TYENEFTSDIPAP

SEQ ID NO: 10283 - protein, 13 aa, Apium graveolens
DGGSICKTTAIFH

SEQ ID NO: 10284 - protein, 13 aa, Prunus persica
YETKLVASPSGGS

SEQ ID NO: 10285 - protein, 13 aa, Prunus persica
YETKLVASPSGGS

SEQ ID NO: 10286 - protein, 13 aa, Quercus alba
KYQTKGDFQLKEE

SEQ ID NO: 10287 - protein, 13 aa, Castanea sativa
KYQTKGDFQLKEE

SEQ ID NO: 10288 - protein, 13 aa, Carpinus betulus
VAPQVISSVENVG

SEQ ID NO: 10289 - protein, 13 aa, Actinidia deliciosa
ASGIFKKVEAYLL

SEQ ID NO: 10290 - protein, 13 aa, Morus alba
FPKVAPQAAKSAE

SEQ ID NO: 10291 - protein, 13 aa, Morus bombycis
FPKVAPQAAKSAE

SEQ ID NO: 10292 - protein, 13 aa, Daucus carota
GSITKTTAIFHTK

SEQ ID NO: 10293 - protein, 13 aa, Daucus carota
GGSITKTTAIFHT

SEQ ID NO: 10294 - protein, 13 aa, Rubus idaeus
PQAVKSVEIIEGD

SEQ ID NO: 10295 - protein, 13 aa, Betula verrucosa
YSVIEGGPIGDTL

SEQ ID NO: 10296 - protein, 13 aa, Betula verrucosa
RAVESYLLAHSDA

SEQ ID NO: 10297 - protein, 13 aa, Malus domestica
EGSQYGYVKHRID

SEQ ID NO: 10298 - protein, 13 aa, Betula platyphylla
ENVSSAENIEGNG

SEQ ID NO: 10299 - protein, 13 aa, Daucus carota
VPTADGGSITKTT

SEQ ID NO: 10300 - protein, 13 aa, Betula verrucosa
TPDGGSILKISNK

SEQ ID NO: 10301 - protein, 13 aa, Betula platyphylla
YSIIEGGPLGDTL

SEQ ID NO: 10302 - protein, 13 aa, Morus bombycis
SGGSIIKVTTTFH

SEQ ID NO: 10303 - protein, 13 aa, Pyrus communis
TIKSISHYHTKGD

SEQ ID NO: 10304 - protein, 13 aa, Malus domestica
AHGLFKLIESYLK

SEQ ID NO: 10305 - protein, 13 aa, Pyrus communis
AHGLFKLIESYLK

SEQ ID NO: 10306 - protein, 13 aa, Ostrya carpinifolia
AISKVENVGGNGG

SEQ ID NO: 10307 - protein, 13 aa, Castanea sativa
LDPENCTYSFSVI

SEQ ID NO: 10308 - protein, 13 aa, Quercus alba
LDPENCTYSFSVI

SEQ ID NO: 10309 - protein, 13 aa, Morus alba
DHDNFTYGHSIIE

SEQ ID NO: 10310 - protein, 13 aa, Morus bombycis
DHDNFTYGHSIIE

SEQ ID NO: 10311 - protein, 13 aa, Morus alba
LPDGKYVKQRLDS

SEQ ID NO: 10312 - protein, 13 aa, Morus bombycis
LPDGKYVKQRLDS

SEQ ID NO: 10313 - protein, 13 aa, Castanea sativa
THESQETSVIPPA

SEQ ID NO: 10314 - protein, 13 aa, Daucus carota
SLEITSSVSAEKI

SEQ ID NO: 10315 - protein, 13 aa, Apium graveolens
HTKGDAVVPEENI

SEQ ID NO: 10316 - protein, 13 aa, Daucus carota
HTKGDAVVPEENI

SEQ ID NO: 10317 - protein, 13 aa, Glycine max
KADALFKAIEAYL

SEQ ID NO: 10318 - protein, 13 aa, Actinidia deliciosa
KERASGIFKKVEA

SEQ ID NO: 10319 - protein, 13 aa, Morus alba
VAPQAAKSAETVE

SEQ ID NO: 10320 - protein, 13 aa, Morus bombycis
VAPQAAKSAETVE

SEQ ID NO: 10321 - protein, 13 aa, Betula verrucosa
TLEKISNEIKIVA

SEQ ID NO: 10322 - protein, 13 aa, Morus alba
PSTVAPARFFKAA

SEQ ID NO: 10323 - protein, 13 aa, Fagus sylvatica
TTVITPARLFKAF

SEQ ID NO: 10324 - protein, 13 aa, Morus bombycis
FTSTVAPARFFKA

SEQ ID NO: 10325 - protein, 13 aa, Actinidia chinensis
PDGGSICKNRSIY

SEQ ID NO: 10326 - protein, 13 aa, Daucus carota
APGAYKSVDVKGD

SEQ ID NO: 10327 - protein, 13 aa, Carpinus betulus
NITFAEGIPFKFV

SEQ ID NO: 10328 - protein, 13 aa, Betula platyphylla
IEGGPLGDTLEKI

SEQ ID NO: 10329 - protein, 13 aa, Actinidia chinensis
SISYHIKIVACPD

SEQ ID NO: 10330 - protein, 13 aa, Fagus sylvatica
KEEASGIFKAVEA

SEQ ID NO: 10331 - protein, 13 aa, Apium graveolens
VIDGDILLGFIES

SEQ ID NO: 10332 - protein, 13 aa, Morus alba
VAPARFFKAAVLD

SEQ ID NO: 10333 - protein, 13 aa, Morus bombycis
VAPARFFKAAVLD

SEQ ID NO: 10334 - protein, 13 aa, Fagus sylvatica
SPDGGSILKSTSK

SEQ ID NO: 10335 - protein, 13 aa, Castanea sativa
AAIEKATGLFKAV

SEQ ID NO: 10336 - protein, 13 aa, Pyrus communis
KEKAHGLFKLIES

SEQ ID NO: 10337 - protein, 13 aa, Betula platyphylla
FKYCYSIIEGGPL

SEQ ID NO: 10338 - protein, 13 aa, Corylus avellana
GSRYKYVKERVDE

SEQ ID NO: 10339 - protein, 13 aa, Betula platyphylla
IKKITFPEGSHFK

SEQ ID NO: 10340 - protein, 13 aa, Castanea sativa
IKKITFGEASKYK

SEQ ID NO: 10341 - protein, 13 aa, Vigna radiata
IKKISFVEDGETK

SEQ ID NO: 10342 - protein, 13 aa, Betula platyphylla
SIIEGGPLGDTLE

SEQ ID NO: 10343 - protein, 13 aa, Prunus persica
SPSGGSIIKSTSH

SEQ ID NO: 10344 - protein, 13 aa, Prunus persica
SPSGGSIIKSTSH

SEQ ID NO: 10345 - protein, 13 aa, Actinidia deliciosa
VQTLEGDGGVGTI

SEQ ID NO: 10346 - protein, 13 aa, Prunus persica
KASNLFKLIETYL

SEQ ID NO: 10347 - protein, 13 aa, Prunus persica
KASNLFKLIETYL

SEQ ID NO: 10348 - protein, 13 aa, Daucus carota
SITKTTAIFHTKG

SEQ ID NO: 10349 - protein, 13 aa, Daucus carota
TAIFHTKGDAVVP

SEQ ID NO: 10350 - protein, 13 aa, Apium graveolens
TAIFHTKGDAVVP

SEQ ID NO: 10351 - protein, 13 aa, Daucus carota
DAVVPEENIKFAD

SEQ ID NO: 10352 - protein, 13 aa, Fagus sylvatica
IKAGKEEASGIFK

SEQ ID NO: 10353 - protein, 13 aa, Apium graveolens
PGAYKSVEIKGDG

SEQ ID NO: 10354 - protein, 13 aa, Quercus alba
THESQETSVIAPA

SEQ ID NO: 10355 - protein, 13 aa, Apium graveolens
GDAVVPEENIKYA

SEQ ID NO: 10356 - protein, 13 aa, Alnus glutinosa
LFKAFILDGDKLL

SEQ ID NO: 10357 - protein, 13 aa, Betula platyphylla
KKITFPEGSHFKY

SEQ ID NO: 10358 - protein, 13 aa, Juglans regia
YAYSVIEGDALAD

SEQ ID NO: 10359 - protein, 13 aa, Quercus alba
LPQAIKSTEIIEG

SEQ ID NO: 10360 - protein, 13 aa, Castanea sativa
LPQAIKSTEIIEG

SEQ ID NO: 10361 - protein, 13 aa, Actinidia deliciosa
VFESISYHIKIVA

SEQ ID NO: 10362 - protein, 13 aa, Fragaria ananassa
YTYENEFTSDIPA

SEQ ID NO: 10363 - protein, 13 aa, Fagus sylvatica
KAGKEEASGIFKA

SEQ ID NO: 10364 - protein, 13 aa, Quercus alba
GLLKAVEAYLVAH

SEQ ID NO: 10365 - protein, 13 aa, Ostrya carpinifolia
EVDNANFKYNYTV

SEQ ID NO: 10366 - protein, 13 aa, Carpinus betulus
EVDNANFKYNYTV

SEQ ID NO: 10367 - protein, 13 aa, Quercus alba
FTHESQETSVIAP

SEQ ID NO: 10368 - protein, 13 aa, Ostrya carpinifolia
NANFKYNYTVIEG

SEQ ID NO: 10369 - protein, 13 aa, Carpinus betulus
NANFKYNYTVIEG

SEQ ID NO: 10370 - protein, 13 aa, Daucus carota
TKGDAVVPEENIK

SEQ ID NO: 10371 - protein, 13 aa, Apium graveolens
TKGDAVVPEENIK

SEQ ID NO: 10372 - protein, 13 aa, Morus bombycis
QAAKSAETVEGNG

SEQ ID NO: 10373 - protein, 13 aa, Morus alba
QAAKSAETVEGNG

SEQ ID NO: 10374 - protein, 13 aa, Actinidia deliciosa
GVQTLEGDGGVGT

SEQ ID NO: 10375 - protein, 13 aa, Morus alba
KAKEGKEKAEGLF

SEQ ID NO: 10376 - protein, 13 aa, Morus bombycis
KAKEGKEKAEGLF

SEQ ID NO: 10377 - protein, 13 aa, Ostrya carpinifolia
VDNANFKYNYTVI

SEQ ID NO: 10378 - protein, 13 aa, Carpinus betulus
VDNANFKYNYTVI

SEQ ID NO: 10379 - protein, 13 aa, Daucus carota
DTVIPKAAPGAYK

SEQ ID NO: 10380 - protein, 13 aa, Apium graveolens
ICKTTAIFHTKGD

SEQ ID NO: 10381 - protein, 13 aa, Betula verrucosa
VIEGGPIGDTLEK

SEQ ID NO: 10382 - protein, 13 aa, Morus bombycis
TTFHTVGDAPVDE

SEQ ID NO: 10383 - protein, 13 aa, Carpinus betulus
PQVISSVENVGGN

SEQ ID NO: 10384 - protein, 13 aa, Betula platyphylla
EKISYEIKIVAAP

SEQ ID NO: 10385 - protein, 13 aa, Fragaria ananassa
AVKCAEILEGDGG

SEQ ID NO: 10386 - protein, 13 aa, Betula platyphylla
PENVSSAENIEGN

SEQ ID NO: 10387 - protein, 13 aa, Betula platyphylla
APENVSSAENIEG

SEQ ID NO: 10388 - protein, 13 aa, Actinidia deliciosa
DGLDKENFTYSYS

SEQ ID NO: 10389 - protein, 13 aa, Apium graveolens
ADGGSICKTTAIF

SEQ ID NO: 10390 - protein, 13 aa, Prunus avium
VKGTEILEGDGGV

SEQ ID NO: 10391 - protein, 13 aa, Prunus persica
HSYSYTLIEGDAL

SEQ ID NO: 10392 - protein, 13 aa, Daucus carota
DVDTVIPKAAPGA

SEQ ID NO: 10393 - protein, 13 aa, Betula verrucosa
AVESYLLAHSDAY

SEQ ID NO: 10394 - protein, 13 aa, Prunus persica
PSGGSIIKSTSHY

SEQ ID NO: 10395 - protein, 13 aa, Prunus persica
PSGGSIIKSTSHY

SEQ ID NO: 10396 - protein, 13 aa, Actinidia deliciosa
AGKERASGIFKKV

SEQ ID NO: 10397 - protein, 13 aa, Castanea sativa
YSFSVIEGDVLTD

SEQ ID NO: 10398 - protein, 13 aa, Glycine max
IKKITFLEDGETK

SEQ ID NO: 10399 - protein, 13 aa, Juglans regia
ANFTYAYSVIEGD

SEQ ID NO: 10400 - protein, 13 aa, Daucus carota
LDVDTVIPKAAPG

SEQ ID NO: 10401 - protein, 13 aa, Actinidia chinensis
DGGSICKNRSIYT

SEQ ID NO: 10402 - protein, 13 aa, Quercus alba
IMKSTTKYQTKGD

SEQ ID NO: 10403 - protein, 13 aa, Castanea sativa
IMKSTTKYQTKGD

SEQ ID NO: 10404 - protein, 13 aa, Morus bombycis
VTTTFHTVGDAPV

SEQ ID NO: 10405 - protein, 13 aa, Corylus avellana
EGSRYKYVKERVD

SEQ ID NO: 10406 - protein, 13 aa, Rubus idaeus
VKDGKERAAGLFK

SEQ ID NO: 10407 - protein, 13 aa, Morus alba
VTKFVASSSGGSI

SEQ ID NO: 10408 - protein, 13 aa, Alnus glutinosa
KAVESYLLAHSDA

SEQ ID NO: 10409 - protein, 13 aa, Vigna radiata
TIKKISFVEDGET

SEQ ID NO: 10410 - protein, 13 aa, Morus bombycis
KVAPQAAKSAETV

SEQ ID NO: 10411 - protein, 13 aa, Morus alba
KVAPQAAKSAETV

SEQ ID NO: 10412 - protein, 13 aa, Vigna radiata
DVQLIEGDGGVGT

SEQ ID NO: 10413 - protein, 13 aa, Actinidia deliciosa
PDGGCICKNRSIY

SEQ ID NO: 10414 - protein, 13 aa, Fragaria ananassa
NHTYSYSLIEGDA

SEQ ID NO: 10415 - protein, 13 aa, Actinidia chinensis
ESISYHIKIVACP

SEQ ID NO: 10416 - protein, 13 aa, Fagus sylvatica
EEASGIFKAVEAY

SEQ ID NO: 10417 - protein, 13 aa, Castanea sativa
SQETSVIPPARLF

SEQ ID NO: 10418 - protein, 13 aa, Arachis hypogaea
KLTLKYHTKGDAK

SEQ ID NO: 10419 - protein, 13 aa, Castanea sativa
SPDGGTIMKSTTK

SEQ ID NO: 10420 - protein, 13 aa, Quercus alba
ESQETSVIAPARL

SEQ ID NO: 10421 - protein, 13 aa, Morus alba
KVTTTFHTVGNAP

SEQ ID NO: 10422 - protein, 13 aa, Morus bombycis
TVAPARFFKAAVL

SEQ ID NO: 10423 - protein, 13 aa, Morus alba
TVAPARFFKAAVL

SEQ ID NO: 10424 - protein, 13 aa, Fragaria ananassa
YSYSLIEGDALSE

SEQ ID NO: 10425 - protein, 13 aa, Actinidia chinensis
ACPDGGSICKNRS

SEQ ID NO: 10426 - protein, 13 aa, Fragaria ananassa
HTYSYSLIEGDAL

SEQ ID NO: 10427 - protein, 13 aa, Castanea sativa
YQTKGDFQLKEEQ

SEQ ID NO: 10428 - protein, 13 aa, Quercus alba
YQTKGDFQLKEEQ

SEQ ID NO: 10429 - protein, 13 aa, Rubus idaeus
VEIIEGDGGVGTV

SEQ ID NO: 10430 - protein, 13 aa, Carpinus betulus
ERVDEVDNANFKY

SEQ ID NO: 10431 - protein, 13 aa, Ostrya carpinifolia
ERVDEVDNANFKY

SEQ ID NO: 10432 - protein, 13 aa, Prunus avium
NIAYDIKLVASPD

SEQ ID NO: 10433 - protein, 13 aa, Vigna radiata
KSDALFKAVEAYL

SEQ ID NO: 10434 - protein, 13 aa, Morus bombycis
EGLFKLVEGYLEA

SEQ ID NO: 10435 - protein, 13 aa, Morus alba
EGLFKLVEGYLEA

SEQ ID NO: 10436 - protein, 13 aa, Prunus persica
EKASNLFKLIETY

SEQ ID NO: 10437 - protein, 13 aa, Prunus persica
EKASNLFKLIETY

SEQ ID NO: 10438 - protein, 13 aa, Actinidia deliciosa
ESISYHIKIVATP

SEQ ID NO: 10439 - protein, 13 aa, Betula verrucosa
SVIEGGPIGDTLE

SEQ ID NO: 10440 - protein, 13 aa, Morus alba
TTTFHTVGNAPVD

SEQ ID NO: 10441 - protein, 13 aa, Castanea sativa
FVASPDGGTIMKS

SEQ ID NO: 10442 - protein, 13 aa, Castanea sativa
CTYSFSVIEGDVL

SEQ ID NO: 10443 - protein, 13 aa, Quercus alba
DGGSIMKSTTKYQ

SEQ ID NO: 10444 - protein, 13 aa, Quercus alba
IKKITFGEASKFK

SEQ ID NO: 10445 - protein, 13 aa, Quercus alba
DPENCTYSFSVIE

SEQ ID NO: 10446 - protein, 13 aa, Castanea sativa
DPENCTYSFSVIE

SEQ ID NO: 10447 - protein, 13 aa, Morus bombycis
TTTFHTVGDAPVD

SEQ ID NO: 10448 - protein, 13 aa, Vigna radiata
KKISFVEDGETKF

SEQ ID NO: 10449 - protein, 13 aa, Daucus carota
TVIPKAAPGAYKS

SEQ ID NO: 10450 - protein, 13 aa, Castanea sativa
KKITFGEASKYKY

SEQ ID NO: 10451 - protein, 13 aa, Actinidia deliciosa
GLDKENFTYSYSI

SEQ ID NO: 10452 - protein, 13 aa, Daucus carota
GDAVVPEENIKFA

SEQ ID NO: 10453 - protein, 13 aa, Morus alba
TLPDGKYVKQRLD

SEQ ID NO: 10454 - protein, 13 aa, Morus bombycis
TLPDGKYVKQRLD

SEQ ID NO: 10455 - protein, 13 aa, Apium graveolens
KGDAVVPEENIKY

SEQ ID NO: 10456 - protein, 13 aa, Ostrya carpinifolia
KNITFAEGSPFKF

SEQ ID NO: 10457 - protein, 13 aa, Vigna radiata
KAKSDALFKAVEA

SEQ ID NO: 10458 - protein, 13 aa, Malus domestica
TIKSISHYHTKGN

SEQ ID NO: 10459 - protein, 13 aa, Actinidia deliciosa
ATPDGGCICKNRS

SEQ ID NO: 10460 - protein, 13 aa, Morus bombycis
IKVTTTFHTVGDA

SEQ ID NO: 10461 - protein, 15 aa, Quercus alba
HESQETSVIAPARLF

SEQ ID NO: 10462 - protein, 15 aa, Vigna radiata
IVEGNGGPGTIKKIS

SEQ ID NO: 10463 - protein, 15 aa, Prunus avium
TYETEFTSVIPPEKL

SEQ ID NO: 10464 - protein, 15 aa, Morus bombycis
DADNLFPKVAPQAAK

SEQ ID NO: 10465 - protein, 15 aa, Morus alba
DADNLFPKVAPQAAK

SEQ ID NO: 10466 - protein, 15 aa, Malus domestica
NGGPGTIKKITFGEG

SEQ ID NO: 10467 - protein, 15 aa, Glycine max
VENVEGNGGPGTIKK

SEQ ID NO: 10468 - protein, 15 aa, Glycine max
NVEGNGGPGTIKKIT

SEQ ID NO: 10469 - protein, 15 aa, Rubus idaeus
IKEEQVKDGKERAAG

SEQ ID NO: 10470 - protein, 15 aa, Corylus avellana
VFNYEVETPSVIPAA

SEQ ID NO: 10471 - protein, 15 aa, Rubus idaeus
NLIPKIAPQAVKSVE

SEQ ID NO: 10472 - protein, 15 aa, Castanea sativa
HESQETSVIPPARLF

SEQ ID NO: 10473 - protein, 15 aa, Actinidia chinensis
FILDGDTLVPKVLPH

SEQ ID NO: 10474 - protein, 15 aa, Pyrus communis
KSISHYHTKGDIEIK

SEQ ID NO: 10475 - protein, 15 aa, Juglans regia
LFKAVEGYLLAHPDA

SEQ ID NO: 10476 - protein, 15 aa, Alnus glutinosa
VFNYEAETPSVIPAA

SEQ ID NO: 10477 - protein, 15 aa, Arachis hypogaea
VEIVEGNGGPGTIKK

SEQ ID NO: 10478 - protein, 15 aa, Betula verrucosa
PIGDTLEKISNEIKI

SEQ ID NO: 10479 - protein, 15 aa, Carpinus betulus
GGPGTIKNITFAEGI

SEQ ID NO: 10480 - protein, 15 aa, Malus domestica
EILEGNGGPGTIKKI

SEQ ID NO: 10481 - protein, 15 aa, Betula platyphylla
GGGSILKITSKYHTK

SEQ ID NO: 10482 - protein, 15 aa, Fragaria ananassa
DIPAPKLFKAFVLDA

SEQ ID NO: 10483 - protein, 15 aa, Vigna radiata
GNGGPGTIKKISFVE

SEQ ID NO: 10484 - protein, 15 aa, Prunus persica
SEILEGDGGPGTIKK

SEQ ID NO: 10485 - protein, 15 aa, Prunus persica
SEILEGDGGPGTIKK

SEQ ID NO: 10486 - protein, 15 aa, Ostrya carpinifolia
GGPGTIKNITFAEGS

SEQ ID NO: 10487 - protein, 15 aa, Fagus sylvatica
EGSGGPGTIKKITFG

SEQ ID NO: 10488 - protein, 15 aa, Vigna radiata
PGTIKKISFVEDGET

SEQ ID NO: 10489 - protein, 15 aa, Arachis hypogaea
EIVEGNGGPGTIKKL

SEQ ID NO: 10490 - protein, 15 aa, Castanea sativa
ATGLFKAVEAYLLAN

SEQ ID NO: 10491 - protein, 15 aa, Prunus persica
PGTIKKITFGEGSQY

SEQ ID NO: 10492 - protein, 15 aa, Prunus persica
PGTIKKITFGEGSQY

SEQ ID NO: 10493 - protein, 15 aa, Pyrus communis
PGTIKKITFGEGSQY

SEQ ID NO: 10494 - protein, 15 aa, Betula verrucosa
EGNGGPGTIKKISFP

SEQ ID NO: 10495 - protein, 15 aa, Betula platyphylla
GPGTIKKITFPEGSH

SEQ ID NO: 10496 - protein, 15 aa, Corylus avellana
RVDEVDNTNFTYSYT

SEQ ID NO: 10497 - protein, 15 aa, Alnus glutinosa
GPGTIKKITFPEGSP

SEQ ID NO: 10498 - protein, 15 aa, Juglans regia
PGTIKKINFGEGSQY

SEQ ID NO: 10499 - protein, 15 aa, Carpinus betulus
AKEMAEKLLRAVESY

SEQ ID NO: 10500 - protein, 15 aa, Ostrya carpinifolia
AKEMAEKLLRAVESY

SEQ ID NO: 10501 - protein, 15 aa, Betula platyphylla
KVAPENVSSAENIEG

SEQ ID NO: 10502 - protein, 15 aa, Corylus avellana
AEKLLRAVETYLLAH

SEQ ID NO: 10503 - protein, 15 aa, Quercus alba
GPGTIKKITFGEASK

SEQ ID NO: 10504 - protein, 15 aa, Castanea sativa
GPGTIKKITFGEASK

SEQ ID NO: 10505 - protein, 15 aa, Pyrus communis
GGPGTIKKITFGEGS

SEQ ID NO: 10506 - protein, 15 aa, Ostrya carpinifolia
PKVAPQAISKVENVG

SEQ ID NO: 10507 - protein, 15 aa, Prunus persica
VFTYESEFTSEIPPP

SEQ ID NO: 10508 - protein, 15 aa, Prunus persica
VFTYESEFTSEIPPP

SEQ ID NO: 10509 - protein, 15 aa, Alnus glutinosa
GNGGPGTIKKITFPE

SEQ ID NO: 10510 - protein, 15 aa, Ostrya carpinifolia
GPGTIKNITFAEGSP

SEQ ID NO: 10511 - protein, 15 aa, Fagus sylvatica
KLVASPDGGSILKST

SEQ ID NO: 10512 - protein, 15 aa, Prunus avium
EIKEEQVKAGKEKAA

SEQ ID NO: 10513 - protein, 15 aa, Prunus persica
LFKAFVLDADNLVPK

SEQ ID NO: 10514 - protein, 15 aa, Prunus persica
LFKAFVLDADNLVPK

SEQ ID NO: 10515 - protein, 15 aa, Fagus sylvatica
KYHTKGDHEIKEDQI

SEQ ID NO: 10516 - protein, 15 aa, Morus alba
GNGGPGTVKKITLPD

SEQ ID NO: 10517 - protein, 15 aa, Morus bombycis
GNGGPGTVKKITLPD

SEQ ID NO: 10518 - protein, 15 aa, Betula platyphylla
ENIEGNGGPGTIKKI

SEQ ID NO: 10519 - protein, 15 aa, Betula verrucosa
HEVKAEQVKASKEMG

SEQ ID NO: 10520 - protein, 15 aa, Corylus avellana
DGDKLIPKVAPQAIT

SEQ ID NO: 10521 - protein, 15 aa, Carpinus betulus
GPGTIKNITFAEGIP

SEQ ID NO: 10522 - protein, 15 aa, Prunus persica
GDGGPGTIKKITFGE

SEQ ID NO: 10523 - protein, 15 aa, Fragaria ananassa
GDGGPGTIKKITFGE

SEQ ID NO: 10524 - protein, 15 aa, Prunus persica
GDGGPGTIKKITFGE

SEQ ID NO: 10525 - protein, 15 aa, Juglans regia
AFVLDADNLIPKVVP

SEQ ID NO: 10526 - protein, 15 aa, Fragaria ananassa
NLIPKIAPQAVKCAE

SEQ ID NO: 10527 - protein, 15 aa, Alnus glutinosa
NIEGNGGPGTIKKIT

SEQ ID NO: 10528 - protein, 15 aa, Fagus sylvatica
AFVLDADNLIPKVAP

SEQ ID NO: 10529 - protein, 15 aa, Quercus alba
IIEGNGGPGTIKKIT

SEQ ID NO: 10530 - protein, 15 aa, Castanea sativa
IIEGNGGPGTIKKIT

SEQ ID NO: 10531 - protein, 15 aa, Fragaria ananassa
LEGDGGPGTIKKITF

SEQ ID NO: 10532 - protein, 15 aa, Prunus persica
LEGDGGPGTIKKITF

SEQ ID NO: 10533 - protein, 15 aa, Prunus persica
LEGDGGPGTIKKITF

SEQ ID NO: 10534 - protein, 15 aa, Glycine max
GNGGPGTIKKITFLE

SEQ ID NO: 10535 - protein, 15 aa, Glycine max
GPGTIKKITFLEDGE

SEQ ID NO: 10536 - protein, 15 aa, Prunus avium
VEIKEEQVKAGKEKA

SEQ ID NO: 10537 - protein, 15 aa, Juglans regia
IDEANFTYAYSVIEG

SEQ ID NO: 10538 - protein, 15 aa, Pyrus communis
ILEGNGGPGTIKKIT

SEQ ID NO: 10539 - protein, 15 aa, Morus bombycis
VEGNGGPGTVKKITL

SEQ ID NO: 10540 - protein, 15 aa, Morus alba
VEGNGGPGTVKKITL

SEQ ID NO: 10541 - protein, 15 aa, Betula verrucosa
DGDNLFPKVAPQAIS

SEQ ID NO: 10542 - protein, 15 aa, Carpinus betulus
PKVAPQVISSVENVG

SEQ ID NO: 10543 - protein, 15 aa, Vigna radiata
TIKKISFVEDGETKF

SEQ ID NO: 10544 - protein, 15 aa, Malus domestica
GPGTIKKITFGEGSQ

SEQ ID NO: 10545 - protein, 15 aa, Betula platyphylla
SFVLDADNLIPKVAP

SEQ ID NO: 10546 - protein, 15 aa, Arachis hypogaea
IVEGNGGPGTIKKLT

SEQ ID NO: 10547 - protein, 15 aa, Malus domestica
LEGNGGPGTIKKITF

SEQ ID NO: 10548 - protein, 15 aa, Pyrus communis
LEGNGGPGTIKKITF

SEQ ID NO: 10549 - protein, 15 aa, Juglans regia
GNGGPGTIKKINFGE

SEQ ID NO: 10550 - protein, 15 aa, Prunus persica
EGDGGPGTIKKITFG

SEQ ID NO: 10551 - protein, 15 aa, Fragaria ananassa
EGDGGPGTIKKITFG

SEQ ID NO: 10552 - protein, 15 aa, Prunus persica
EGDGGPGTIKKITFG

SEQ ID NO: 10553 - protein, 15 aa, Betula verrucosa
GNGGPGTIKKISFPE

SEQ ID NO: 10554 - protein, 15 aa, Fagus sylvatica
IEGSGGPGTIKKITF

SEQ ID NO: 10555 - protein, 15 aa, Ostrya carpinifolia
NGGPGTIKNITFAEG

SEQ ID NO: 10556 - protein, 15 aa, Carpinus betulus
NGGPGTIKNITFAEG

SEQ ID NO: 10557 - protein, 15 aa, Alnus glutinosa
EGNGGPGTIKKITFP

SEQ ID NO: 10558 - protein, 15 aa, Betula platyphylla
EGNGGPGTIKKITFP

SEQ ID NO: 10559 - protein, 15 aa, Fagus sylvatica
RLFKAFVLDADNLIP

SEQ ID NO: 10560 - protein, 15 aa, Betula platyphylla
GNGGPGTIKKITFPE

SEQ ID NO: 10561 - protein, 15 aa, Quercus alba
IEGNGGPGTIKKITF

SEQ ID NO: 10562 - protein, 15 aa, Castanea sativa
IEGNGGPGTIKKITF

SEQ ID NO: 10563 - protein, 15 aa, Corylus avellana
NVEGNGGPGTIKNIT

SEQ ID NO: 10564 - protein, 15 aa, Actinidia chinensis
LYKAFILDGDTLVPK

SEQ ID NO: 10565 - protein, 15 aa, Pyrus communis
EGNGGPGTIKKITFG

SEQ ID NO: 10566 - protein, 15 aa, Quercus alba
EGNGGPGTIKKITFG

SEQ ID NO: 10567 - protein, 15 aa, Malus domestica
EGNGGPGTIKKITFG

SEQ ID NO: 10568 - protein, 15 aa, Castanea sativa
EGNGGPGTIKKITFG

SEQ ID NO: 10569 - protein, 15 aa, Prunus avium
IKEEQVKAGKEKAAG

SEQ ID NO: 10570 - protein, 15 aa, Juglans regia
IIEGNGGPGTIKKIN

SEQ ID NO: 10571 - protein, 15 aa, Fagus sylvatica
GSGGPGTIKKITFGE

SEQ ID NO: 10572 - protein, 15 aa, Fragaria ananassa
IKEEHVKAGKEKAAH

SEQ ID NO: 10573 - protein, 15 aa, Quercus alba
KCVASPDGGSIMKST

SEQ ID NO: 10574 - protein, 15 aa, Glycine max
EGNGGPGTIKKITFL

SEQ ID NO: 10575 - protein, 15 aa, Corylus avellana
GNGGPGTIKNITFGE

SEQ ID NO: 10576 - protein, 15 aa, Quercus alba
GNGGPGTIKKITFGE

SEQ ID NO: 10577 - protein, 15 aa, Castanea sativa
GNGGPGTIKKITFGE

SEQ ID NO: 10578 - protein, 15 aa, Pyrus communis
GNGGPGTIKKITFGE

SEQ ID NO: 10579 - protein, 15 aa, Malus domestica
ILEGNGGPGTIKKIT

SEQ ID NO: 10580 - protein, 15 aa, Morus alba
NLFPKVAPQAAKSAE

SEQ ID NO: 10581 - protein, 15 aa, Morus bombycis
NLFPKVAPQAAKSAE

SEQ ID NO: 10582 - protein, 15 aa, Corylus avellana
EGNGGPGTIKNITFG

SEQ ID NO: 10583 - protein, 15 aa, Fagus sylvatica
NLIPKVAPQAIKSSE

SEQ ID NO: 10584 - protein, 15 aa, Fagus sylvatica
SGGPGTIKKITFGEG

SEQ ID NO: 10585 - protein, 15 aa, Corylus avellana
GGPGTIKNITFGEGS

SEQ ID NO: 10586 - protein, 15 aa, Quercus alba
GGPGTIKKITFGEAS

SEQ ID NO: 10587 - protein, 15 aa, Castanea sativa
GGPGTIKKITFGEAS

SEQ ID NO: 10588 - protein, 15 aa, Juglans regia
GGPGTIKKINFGEGS

SEQ ID NO: 10589 - protein, 15 aa, Pyrus communis
NGGPGTIKKITFGEG

SEQ ID NO: 10590 - protein, 15 aa, Carpinus betulus
ENVGGNGGPGTIKNI

SEQ ID NO: 10591 - protein, 15 aa, Ostrya carpinifolia
ENVGGNGGPGTIKNI

SEQ ID NO: 10592 - protein, 15 aa, Juglans regia
EGNGGPGTIKKINFG

SEQ ID NO: 10593 - protein, 15 aa, Glycine max
VEGNGGPGTIKKITF

SEQ ID NO: 10594 - protein, 15 aa, Fragaria ananassa
GGPGTIKKITFGEGS

SEQ ID NO: 10595 - protein, 15 aa, Prunus persica
GGPGTIKKITFGEGS

SEQ ID NO: 10596 - protein, 15 aa, Prunus persica
GGPGTIKKITFGEGS

SEQ ID NO: 10597 - protein, 15 aa, Juglans regia
IEGNGGPGTIKKINF

SEQ ID NO: 10598 - protein, 15 aa, Vigna radiata
EGNGGPGTIKKISFV

SEQ ID NO: 10599 - protein, 15 aa, Betula platyphylla
NGGPGTIKKITFPEG

SEQ ID NO: 10600 - protein, 15 aa, Alnus glutinosa
NGGPGTIKKITFPEG

SEQ ID NO: 10601 - protein, 15 aa, Carpinus betulus
VGGNGGPGTIKNITF

SEQ ID NO: 10602 - protein, 15 aa, Ostrya carpinifolia
VGGNGGPGTIKNITF

SEQ ID NO: 10603 - protein, 15 aa, Alnus glutinosa
IEGNGGPGTIKKITF

SEQ ID NO: 10604 - protein, 15 aa, Betula platyphylla
IEGNGGPGTIKKITF

SEQ ID NO: 10605 - protein, 15 aa, Glycine max
ENVEGNGGPGTIKKI

SEQ ID NO: 10606 - protein, 15 aa, Morus alba
EGNGGPGTVKKITLP

SEQ ID NO: 10607 - protein, 15 aa, Morus bombycis
EGNGGPGTVKKITLP

SEQ ID NO: 10608 - protein, 15 aa, Arachis hypogaea
GNGGPGTIKKLTIVE

SEQ ID NO: 10609 - protein, 15 aa, Glycine max
NGGPGTIKKITFLED

SEQ ID NO: 10610 - protein, 15 aa, Glycine max
GGPGTIKKITFLEDG

SEQ ID NO: 10611 - protein, 15 aa, Corylus avellana
VEGNGGPGTIKNITF

SEQ ID NO: 10612 - protein, 15 aa, Alnus glutinosa
ENIEGNGGPGTIKKI

SEQ ID NO: 10613 - protein, 15 aa, Betula verrucosa
ENIEGNGGPGTIKKI

SEQ ID NO: 10614 - protein, 15 aa, Juglans regia
NGGPGTIKKINFGEG

SEQ ID NO: 10615 - protein, 15 aa, Betula verrucosa
NIEGNGGPGTIKKIS

SEQ ID NO: 10616 - protein, 15 aa, Corylus avellana
ENVEGNGGPGTIKNI

SEQ ID NO: 10617 - protein, 15 aa, Betula platyphylla
NIEGNGGPGTIKKIT

SEQ ID NO: 10618 - protein, 15 aa, Prunus persica
DGGPGTIKKITFGEG

SEQ ID NO: 10619 - protein, 15 aa, Prunus persica
DGGPGTIKKITFGEG

SEQ ID NO: 10620 - protein, 15 aa, Fragaria ananassa
DGGPGTIKKITFGEG

SEQ ID NO: 10621 - protein, 15 aa, Vigna radiata
EIVEGNGGPGTIKKI

SEQ ID NO: 10622 - protein, 15 aa, Vigna radiata
VEGNGGPGTIKKISF

SEQ ID NO: 10623 - protein, 15 aa, Arachis hypogaea
EGNGGPGTIKKLTIV

SEQ ID NO: 10624 - protein, 15 aa, Pyrus communis
LFKAFVLDADNLIPK

SEQ ID NO: 10625 - protein, 15 aa, Fagus sylvatica
ADNLIPKVAPQAIKS

SEQ ID NO: 10626 - protein, 15 aa, Malus domestica
GNGGPGTIKKITFGE

SEQ ID NO: 10627 - protein, 15 aa, Betula platyphylla
GGPGTIKKITFPEGS

SEQ ID NO: 10628 - protein, 15 aa, Alnus glutinosa
GGPGTIKKITFPEGS

SEQ ID NO: 10629 - protein, 15 aa, Betula platyphylla
AENIEGNGGPGTIKK

SEQ ID NO: 10630 - protein, 15 aa, Betula verrucosa
IEGNGGPGTIKKISF

SEQ ID NO: 10631 - protein, 15 aa, Betula verrucosa
VENIEGNGGPGTIKK

SEQ ID NO: 10632 - protein, 15 aa, Alnus glutinosa
VENIEGNGGPGTIKK

SEQ ID NO: 10633 - protein, 15 aa, Arachis hypogaea
VEGNGGPGTIKKLTI

SEQ ID NO: 10634 - protein, 15 aa, Castanea sativa
NGGPGTIKKITFGEA

SEQ ID NO: 10635 - protein, 15 aa, Quercus alba
NGGPGTIKKITFGEA

SEQ ID NO: 10636 - protein, 15 aa, Corylus avellana
NGGPGTIKNITFGEG

SEQ ID NO: 10637 - protein, 15 aa, Fragaria ananassa
ADNLIPKIAPQAVKC

SEQ ID NO: 10638 - protein, 15 aa, Castanea sativa
PGTIKKITFGEASKY

SEQ ID NO: 10639 - protein, 15 aa, Fagus sylvatica
PGTIKKITFGEGSQF

SEQ ID NO: 10640 - protein, 15 aa, Vigna radiata
NGGPGTIKKISFVED

SEQ ID NO: 10641 - protein, 15 aa, Quercus alba
PGTIKKITFGEASKF

SEQ ID NO: 10642 - protein, 15 aa, Fragaria ananassa
APKLFKAFVLDADNL

SEQ ID NO: 10643 - protein, 15 aa, Fragaria ananassa
PGTIKKITFGEGSHY

SEQ ID NO: 10644 - protein, 15 aa, Malus domestica
AEILEGNGGPGTIKK

SEQ ID NO: 10645 - protein, 15 aa, Betula verrucosa
NGGPGTIKKISFPEG

SEQ ID NO: 10646 - protein, 15 aa, Glycine max
PGTIKKITFLEDGET

SEQ ID NO: 10647 - protein, 15 aa, Fagus sylvatica
ARLFKAFVLDADNLI

SEQ ID NO: 10648 - protein, 15 aa, Juglans regia
ARLFKAFVLDADNLI

SEQ ID NO: 10649 - protein, 15 aa, Fagus sylvatica
GGPGTIKKITFGEGS

SEQ ID NO: 10650 - protein, 15 aa, Castanea sativa
ARLFKAFVLDSDNLI

SEQ ID NO: 10651 - protein, 15 aa, Morus bombycis
GGPGTVKKITLPDGK

SEQ ID NO: 10652 - protein, 15 aa, Morus alba
GGPGTVKKITLPDGK

SEQ ID NO: 10653 - protein, 15 aa, Juglans regia
RLFKAFVLDADNLIP

SEQ ID NO: 10654 - protein, 15 aa, Castanea sativa
RLFKAFVLDSDNLIP

SEQ ID NO: 10655 - protein, 15 aa, Betula platyphylla
PGTIKKITFPEGSHF

SEQ ID NO: 10656 - protein, 15 aa, Betula verrucosa
GGPGTIKKISFPEGF

SEQ ID NO: 10657 - protein, 15 aa, Alnus glutinosa
PGTIKKITFPEGSPF

SEQ ID NO: 10658 - protein, 15 aa, Fagus sylvatica
IIEGSGGPGTIKKIT

SEQ ID NO: 10659 - protein, 15 aa, Betula verrucosa
PGTIKKISFPEGFPF

SEQ ID NO: 10660 - protein, 15 aa, Prunus persica
ILEGDGGPGTIKKIT

SEQ ID NO: 10661 - protein, 15 aa, Prunus persica
ILEGDGGPGTIKKIT

SEQ ID NO: 10662 - protein, 15 aa, Carpinus betulus
PGTIKNITFAEGIPF

SEQ ID NO: 10663 - protein, 15 aa, Morus bombycis
NGGPGTVKKITLPDG

SEQ ID NO: 10664 - protein, 15 aa, Morus alba
NGGPGTVKKITLPDG

SEQ ID NO: 10665 - protein, 15 aa, Pyrus communis
PRLFKAFVLDADNLI

SEQ ID NO: 10666 - protein, 15 aa, Vigna radiata
VEIVEGNGGPGTIKK

SEQ ID NO: 10667 - protein, 15 aa, Ostrya carpinifolia
PGTIKNITFAEGSPF

SEQ ID NO: 10668 - protein, 15 aa, Pyrus communis
EILEGNGGPGTIKKI

SEQ ID NO: 10669 - protein, 15 aa, Prunus persica
PRLFKAFVLDADNLV

SEQ ID NO: 10670 - protein, 15 aa, Prunus persica
PRLFKAFVLDADNLV

SEQ ID NO: 10671 - protein, 15 aa, Malus domestica
PSRLFKAFVLDADNL

SEQ ID NO: 10672 - protein, 15 aa, Corylus avellana
PGTIKNITFGEGSRY

SEQ ID NO: 10673 - protein, 15 aa, Prunus avium
ILEGDGGVGTIKKVT

SEQ ID NO: 10674 - protein, 15 aa, Rubus idaeus
ADNLIPKIAPQAVKS

SEQ ID NO: 10675 - protein, 15 aa, Vigna radiata
GGPGTIKKISFVEDG

SEQ ID NO: 10676 - protein, 15 aa, Betula platyphylla
ARLFKSFVLDADNLI

SEQ ID NO: 10677 - protein, 15 aa, Betula verrucosa
RLFKAFILDGDNLFP

SEQ ID NO: 10678 - protein, 15 aa, Juglans regia
LDADNLIPKVVPQAV

SEQ ID NO: 10679 - protein, 15 aa, Prunus avium
GVGTIKKVTFGEGSQ

SEQ ID NO: 10680 - protein, 15 aa, Pyrus communis
ADNLIPKIAPQAIKH

SEQ ID NO: 10681 - protein, 15 aa, Betula verrucosa
GPGTIKKISFPEGFP

SEQ ID NO: 10682 - protein, 15 aa, Malus domestica
DADNLIPKIAPQAIK

SEQ ID NO: 10683 - protein, 15 aa, Fagus sylvatica
DADNLIPKVAPQAIK

SEQ ID NO: 10684 - protein, 15 aa, Arachis hypogaea
SVEIVEGNGGPGTIK

SEQ ID NO: 10685 - protein, 15 aa, Juglans regia
EIIEGNGGPGTIKKI

SEQ ID NO: 10686 - protein, 15 aa, Pyrus communis
NLIPKIAPQAIKHAE

SEQ ID NO: 10687 - protein, 15 aa, Prunus avium
VGTIKKVTFGEGSQY

SEQ ID NO: 10688 - protein, 15 aa, Prunus persica
EILEGDGGPGTIKKI

SEQ ID NO: 10689 - protein, 15 aa, Prunus persica
EILEGDGGPGTIKKI

SEQ ID NO: 10690 - protein, 15 aa, Malus domestica
GGPGTIKKITFGEGS

SEQ ID NO: 10691 - protein, 15 aa, Juglans regia
GPGTIKKINFGEGSQ

SEQ ID NO: 10692 - protein, 15 aa, Corylus avellana
VENVEGNGGPGTIKN

SEQ ID NO: 10693 - protein, 15 aa, Betula platyphylla
RLFKSFVLDADNLIP

SEQ ID NO: 10694 - protein, 15 aa, Betula platyphylla
KKITFPEGSHFKYMK

SEQ ID NO: 10695 - protein, 15 aa, Vigna radiata
GPGTIKKISFVEDGE

SEQ ID NO: 10696 - protein, 15 aa, Prunus avium
LFKAFILDADNLIPK

SEQ ID NO: 10697 - protein, 15 aa, Actinidia chinensis
TIKEVTFGEGSHHKC

SEQ ID NO: 10698 - protein, 15 aa, Morus alba
RFFKAAVLDADNLFP

SEQ ID NO: 10699 - protein, 15 aa, Morus bombycis
RFFKAAVLDADNLFP

SEQ ID NO: 10700 - protein, 15 aa, Fagus sylvatica
LDADNLIPKVAPQAI

SEQ ID NO: 10701 - protein, 15 aa, Prunus persica
ADNLVPKIAPQAIKH

SEQ ID NO: 10702 - protein, 15 aa, Prunus persica
ADNLVPKIAPQAIKH

SEQ ID NO: 10703 - protein, 15 aa, Corylus avellana
GPGTIKNITFGEGSR

SEQ ID NO: 10704 - protein, 15 aa, Carpinus betulus
VENVGGNGGPGTIKN

SEQ ID NO: 10705 - protein, 15 aa, Pyrus communis
GPGTIKKITFGEGSQ

SEQ ID NO: 10706 - protein, 15 aa, Prunus persica
GPGTIKKITFGEGSQ

SEQ ID NO: 10707 - protein, 15 aa, Prunus persica
GPGTIKKITFGEGSQ

SEQ ID NO: 10708 - protein, 15 aa, Fagus sylvatica
GPGTIKKITFGEGSQ

SEQ ID NO: 10709 - protein, 15 aa, Fragaria ananassa
GPGTIKKITFGEGSH

SEQ ID NO: 10710 - protein, 15 aa, Betula platyphylla
LDADNLIPKVAPENV

SEQ ID NO: 10711 - protein, 15 aa, Prunus avium
LDADNLIPKVAPTAV

SEQ ID NO: 10712 - protein, 15 aa, Prunus persica
LDADNLVPKIAPQAI

SEQ ID NO: 10713 - protein, 15 aa, Prunus persica
LDADNLVPKIAPQAI

SEQ ID NO: 10714 - protein, 15 aa, Morus bombycis
LDADNLFPKVAPQAA

SEQ ID NO: 10715 - protein, 15 aa, Morus alba
LDADNLFPKVAPQAA

SEQ ID NO: 10716 - protein, 15 aa, Castanea sativa
LDSDNLIPKVLPQAI

SEQ ID NO: 10717 - protein, 15 aa, Pyrus communis
DADNLIPKIAPQAIK

SEQ ID NO: 10718 - protein, 15 aa, Castanea sativa
EIIEGNGGPGTIKKI

SEQ ID NO: 10719 - protein, 15 aa, Fagus sylvatica
EIIEGSGGPGTIKKI

SEQ ID NO: 10720 - protein, 15 aa, Prunus persica
DADNLVPKIAPQAIK

SEQ ID NO: 10721 - protein, 15 aa, Prunus persica
DADNLVPKIAPQAIK

SEQ ID NO: 10722 - protein, 15 aa, Carpinus betulus
SSVENVGGNGGPGTI

SEQ ID NO: 10723 - protein, 15 aa, Fragaria ananassa
EILEGDGGPGTIKKI

SEQ ID NO: 10724 - protein, 15 aa, Quercus alba
TEIIEGNGGPGTIKK

SEQ ID NO: 10725 - protein, 15 aa, Castanea sativa
TEIIEGNGGPGTIKK

SEQ ID NO: 10726 - protein, 15 aa, Juglans regia
SEIIEGNGGPGTIKK

SEQ ID NO: 10727 - protein, 15 aa, Morus alba
TVEGNGGPGTVKKIT

SEQ ID NO: 10728 - protein, 15 aa, Morus bombycis
TVEGNGGPGTVKKIT

SEQ ID NO: 10729 - protein, 15 aa, Fagus sylvatica
VLDADNLIPKVAPQA

SEQ ID NO: 10730 - protein, 15 aa, Malus domestica
VLDADNLIPKIAPQA

SEQ ID NO: 10731 - protein, 15 aa, Juglans regia
GTIKKINFGEGSQYK

SEQ ID NO: 10732 - protein, 15 aa, Prunus avium
GDGGVGTIKKVTFGE

SEQ ID NO: 10733 - protein, 15 aa, Fragaria ananassa
DADNLIPKIAPQAVK

SEQ ID NO: 10734 - protein, 15 aa, Rubus idaeus
DADNLIPKIAPQAVK

SEQ ID NO: 10735 - protein, 15 aa, Betula verrucosa
GDNLFPKVAPQAISS

SEQ ID NO: 10736 - protein, 15 aa, Malus domestica
LDADNLIPKIAPQAI

SEQ ID NO: 10737 - protein, 15 aa, Pyrus communis
LDADNLIPKIAPQAI

SEQ ID NO: 10738 - protein, 15 aa, Juglans regia
VLDADNLIPKVVPQA

SEQ ID NO: 10739 - protein, 15 aa, Ostrya carpinifolia
DKLIPKVAPQAISKV

SEQ ID NO: 10740 - protein, 15 aa, Betula verrucosa
GTIKKISFPEGFPFK

SEQ ID NO: 10741 - protein, 15 aa, Rubus idaeus
LDADNLIPKIAPQAV

SEQ ID NO: 10742 - protein, 15 aa, Fragaria ananassa
LDADNLIPKIAPQAV

SEQ ID NO: 10743 - protein, 15 aa, Malus domestica
PGTIKKITFGEGSQY

SEQ ID NO: 10744 - protein, 15 aa, Betula platyphylla
GTIKKITFPEGSHFK

SEQ ID NO: 10745 - protein, 15 aa, Betula verrucosa
NLFPKVAPQAISSVE

SEQ ID NO: 10746 - protein, 15 aa, Prunus avium
VFTYETEFTSVIPPE

SEQ ID NO: 10747 - protein, 15 aa, Corylus avellana
GDKLIPKVAPQAITS

SEQ ID NO: 10748 - protein, 15 aa, Prunus avium
ILDADNLIPKVAPTA

SEQ ID NO: 10749 - protein, 15 aa, Prunus avium
AFILDADNLIPKVAP

SEQ ID NO: 10750 - protein, 15 aa, Betula platyphylla
VLDADNLIPKVAPEN

SEQ ID NO: 10751 - protein, 15 aa, Juglans regia
ADNLIPKVVPQAVKS

SEQ ID NO: 10752 - protein, 15 aa, Fragaria ananassa
GTIKKITFGEGSHYG

SEQ ID NO: 10753 - protein, 15 aa, Malus domestica
RLFKAFVLDADNLIP

SEQ ID NO: 10754 - protein, 15 aa, Quercus alba
ARLFKALFLDSDNLI

SEQ ID NO: 10755 - protein, 15 aa, Castanea sativa
SDNLIPKVLPQAIKS

SEQ ID NO: 10756 - protein, 15 aa, Juglans regia
DADNLIPKVVPQAVK

SEQ ID NO: 10757 - protein, 15 aa, Actinidia deliciosa
TIKLTTFGEGSVHKS

SEQ ID NO: 10758 - protein, 15 aa, Rubus idaeus
VLDADNLIPKIAPQA

SEQ ID NO: 10759 - protein, 15 aa, Pyrus communis
VLDADNLIPKIAPQA

SEQ ID NO: 10760 - protein, 15 aa, Fragaria ananassa
VLDADNLIPKIAPQA

SEQ ID NO: 10761 - protein, 15 aa, Betula verrucosa
VFNYETETTSVIPAA

SEQ ID NO: 10762 - protein, 15 aa, Carpinus betulus
GTIKNITFAEGIPFK

SEQ ID NO: 10763 - protein, 15 aa, Fragaria ananassa
ILEGDGGPGTIKKIT

SEQ ID NO: 10764 - protein, 15 aa, Ostrya carpinifolia
VFNYEAETPSVIPAA

SEQ ID NO: 10765 - protein, 15 aa, Carpinus betulus
VFNYEAETPSVIPAA

SEQ ID NO: 10766 - protein, 15 aa, Prunus persica
NLVPKIAPQAIKHSE

SEQ ID NO: 10767 - protein, 15 aa, Prunus persica
NLVPKIAPQAIKHSE

SEQ ID NO: 10768 - protein, 15 aa, Ostrya carpinifolia
GDKLIPKVAPQAISK

SEQ ID NO: 10769 - protein, 15 aa, Prunus avium
ADNLIPKVAPTAVKG

SEQ ID NO: 10770 - protein, 15 aa, Ostrya carpinifolia
LDGDKLIPKVAPQAI

SEQ ID NO: 10771 - protein, 15 aa, Corylus avellana
LDGDKLIPKVAPQAI

SEQ ID NO: 10772 - protein, 15 aa, Ostrya carpinifolia
NVGGNGGPGTIKNIT

SEQ ID NO: 10773 - protein, 15 aa, Carpinus betulus
NVGGNGGPGTIKNIT

SEQ ID NO: 10774 - protein, 15 aa, Prunus avium
DADNLIPKVAPTAVK

SEQ ID NO: 10775 - protein, 15 aa, Ostrya carpinifolia
DGDKLIPKVAPQAIS

SEQ ID NO: 10776 - protein, 15 aa, Carpinus betulus
LDGDKLIPKVAPQVI

SEQ ID NO: 10777 - protein, 15 aa, Prunus avium
KAFILDADNLIPKVA

SEQ ID NO: 10778 - protein, 15 aa, Malus domestica
FVLDADNLIPKIAPQ

SEQ ID NO: 10779 - protein, 15 aa, Prunus persica
GTIKKITFGEGSQYG

SEQ ID NO: 10780 - protein, 15 aa, Pyrus communis
GTIKKITFGEGSQYG

SEQ ID NO: 10781 - protein, 15 aa, Prunus persica
GTIKKITFGEGSQYG

SEQ ID NO: 10782 - protein, 15 aa, Juglans regia
LFKAFVLDADNLIPK

SEQ ID NO: 10783 - protein, 15 aa, Fagus sylvatica
LFKAFVLDADNLIPK

SEQ ID NO: 10784 - protein, 15 aa, Rubus idaeus
LFKAFVLDADNLIPK

SEQ ID NO: 10785 - protein, 15 aa, Fragaria ananassa
LFKAFVLDADNLIPK

SEQ ID NO: 10786 - protein, 15 aa, Fagus sylvatica
GTIKKITFGEGSQFN

SEQ ID NO: 10787 - protein, 15 aa, Prunus avium
TIKKVTFGEGSQYAY

SEQ ID NO: 10788 - protein, 15 aa, Morus alba
ADNLFPKVAPQAAKS

SEQ ID NO: 10789 - protein, 15 aa, Morus bombycis
ADNLFPKVAPQAAKS

SEQ ID NO: 10790 - protein, 15 aa, Castanea sativa
DSDNLIPKVLPQAIK

SEQ ID NO: 10791 - protein, 15 aa, Prunus avium
FKAFILDADNLIPKV

SEQ ID NO: 10792 - protein, 15 aa, Betula verrucosa
AFILDGDNLFPKVAP

SEQ ID NO: 10793 - protein, 15 aa, Malus domestica
SRLFKAFVLDADNLI

SEQ ID NO: 10794 - protein, 15 aa, Fagus sylvatica
FVLDADNLIPKVAPQ

SEQ ID NO: 10795 - protein, 15 aa, Betula platyphylla
LFKSFVLDADNLIPK

SEQ ID NO: 10796 - protein, 15 aa, Betula platyphylla
FKSFVLDADNLIPKV

SEQ ID NO: 10797 - protein, 15 aa, Fagus sylvatica
DNLIPKVAPQAIKSS

SEQ ID NO: 10798 - protein, 15 aa, Quercus alba
EIIEGNGGPGTIKKI

SEQ ID NO: 10799 - protein, 15 aa, Juglans regia
FKAFVLDADNLIPKV

SEQ ID NO: 10800 - protein, 15 aa, Fagus sylvatica
FKAFVLDADNLIPKV

SEQ ID NO: 10801 - protein, 15 aa, Malus domestica
DNLIPKIAPQAIKQA

SEQ ID NO: 10802 - protein, 15 aa, Fragaria ananassa
FKAFVLDADNLIPKI

SEQ ID NO: 10803 - protein, 15 aa, Pyrus communis
FKAFVLDADNLIPKI

SEQ ID NO: 10804 - protein, 15 aa, Rubus idaeus
FKAFVLDADNLIPKI

SEQ ID NO: 10805 - protein, 15 aa, Castanea sativa
GTIKKITFGEASKYK

SEQ ID NO: 10806 - protein, 15 aa, Prunus avium
FILDADNLIPKVAPT

SEQ ID NO: 10807 - protein, 15 aa, Juglans regia
FVLDADNLIPKVVPQ

SEQ ID NO: 10808 - protein, 15 aa, Prunus avium
DGGVGTIKKVTFGEG

SEQ ID NO: 10809 - protein, 15 aa, Castanea sativa
FKAFVLDSDNLIPKV

SEQ ID NO: 10810 - protein, 15 aa, Prunus persica
FKAFVLDADNLVPKI

SEQ ID NO: 10811 - protein, 15 aa, Prunus persica
FKAFVLDADNLVPKI

SEQ ID NO: 10812 - protein, 15 aa, Castanea sativa
LFKAFVLDSDNLIPK

SEQ ID NO: 10813 - protein, 15 aa, Carpinus betulus
GNGGPGTIKNITFAE

SEQ ID NO: 10814 - protein, 15 aa, Ostrya carpinifolia
GNGGPGTIKNITFAE

SEQ ID NO: 10815 - protein, 15 aa, Alnus glutinosa
GTIKKITFPEGSPFK

SEQ ID NO: 10816 - protein, 15 aa, Corylus avellana
GTIKNITFGEGSRYK

SEQ ID NO: 10817 - protein, 15 aa, Malus domestica
LFKAFVLDADNLIPK

SEQ ID NO: 10818 - protein, 15 aa, Alnus glutinosa
RLFKAFILDGDKLLP

SEQ ID NO: 10819 - protein, 15 aa, Rubus idaeus
AFVLDADNLIPKIAP

SEQ ID NO: 10820 - protein, 15 aa, Fragaria ananassa
AFVLDADNLIPKIAP

SEQ ID NO: 10821 - protein, 15 aa, Pyrus communis
AFVLDADNLIPKIAP

SEQ ID NO: 10822 - protein, 15 aa, Malus domestica
AFVLDADNLIPKIAP

SEQ ID NO: 10823 - protein, 15 aa, Malus domestica
ADNLIPKIAPQAIKQ

SEQ ID NO: 10824 - protein, 15 aa, Fagus sylvatica
KAFVLDADNLIPKVA

SEQ ID NO: 10825 - protein, 15 aa, Castanea sativa
DNLIPKVLPQAIKST

SEQ ID NO: 10826 - protein, 15 aa, Betula verrucosa
ISSVENIEGNGGPGT

SEQ ID NO: 10827 - protein, 15 aa, Pyrus communis
DNLIPKIAPQAIKHA

SEQ ID NO: 10828 - protein, 15 aa, Prunus avium
EGDGGVGTIKKVTFG

SEQ ID NO: 10829 - protein, 15 aa, Alnus glutinosa
TIKKITFPEGSPFKY

SEQ ID NO: 10830 - protein, 15 aa, Castanea sativa
SVIPPARLFKAFVLD

SEQ ID NO: 10831 - protein, 15 aa, Juglans regia
SVIPPARLFKAFVLD

SEQ ID NO: 10832 - protein, 15 aa, Juglans regia
KAFVLDADNLIPKVV

SEQ ID NO: 10833 - protein, 15 aa, Castanea sativa
AFVLDSDNLIPKVLP

SEQ ID NO: 10834 - protein, 15 aa, Castanea sativa
FVLDSDNLIPKVLPQ

SEQ ID NO: 10835 - protein, 15 aa, Solanum lycopersicum
LFKALVLDFDNLVPK

SEQ ID NO: 10836 - protein, 15 aa, Malus domestica
FKAFVLDADNLIPKI

SEQ ID NO: 10837 - protein, 15 aa, Pyrus communis
RLFKAFVLDADNLIP

SEQ ID NO: 10838 - protein, 15 aa, Betula platyphylla
KSFVLDADNLIPKVA

SEQ ID NO: 10839 - protein, 15 aa, Juglans regia
NLIPKVVPQAVKSSE

SEQ ID NO: 10840 - protein, 15 aa, Prunus avium
LEGDGGVGTIKKVTF

SEQ ID NO: 10841 - protein, 15 aa, Betula platyphylla
FVLDADNLIPKVAPE

SEQ ID NO: 10842 - protein, 15 aa, Morus bombycis
ARFFKAAVLDADNLF

SEQ ID NO: 10843 - protein, 15 aa, Morus alba
ARFFKAAVLDADNLF

SEQ ID NO: 10844 - protein, 15 aa, Prunus persica
DNLVPKIAPQAIKHS

SEQ ID NO: 10845 - protein, 15 aa, Prunus persica
DNLVPKIAPQAIKHS

SEQ ID NO: 10846 - protein, 15 aa, Castanea sativa
VLDSDNLIPKVLPQA

SEQ ID NO: 10847 - protein, 15 aa, Rubus idaeus
PKLFKAFVLDADNLI

SEQ ID NO: 10848 - protein, 15 aa, Fagus sylvatica
PARLFKAFVLDADNL

SEQ ID NO: 10849 - protein, 15 aa, Castanea sativa
KAFVLDSDNLIPKVL

SEQ ID NO: 10850 - protein, 15 aa, Castanea sativa
NLIPKVLPQAIKSTE

SEQ ID NO: 10851 - protein, 15 aa, Rubus idaeus
KAFVLDADNLIPKIA

SEQ ID NO: 10852 - protein, 15 aa, Fragaria ananassa
KAFVLDADNLIPKIA

SEQ ID NO: 10853 - protein, 15 aa, Pyrus communis
KAFVLDADNLIPKIA

SEQ ID NO: 10854 - protein, 15 aa, Malus domestica
KAFVLDADNLIPKIA

SEQ ID NO: 10855 - protein, 15 aa, Corylus avellana
ITSVENVEGNGGPGT

SEQ ID NO: 10856 - protein, 15 aa, Prunus persica
SEIPPPRLFKAFVLD

SEQ ID NO: 10857 - protein, 15 aa, Pyrus communis
SEIPPPRLFKAFVLD

SEQ ID NO: 10858 - protein, 15 aa, Prunus persica
SEIPPPRLFKAFVLD

SEQ ID NO: 10859 - protein, 15 aa, Pyrus communis
FVLDADNLIPKIAPQ

SEQ ID NO: 10860 - protein, 15 aa, Fragaria ananassa
FVLDADNLIPKIAPQ

SEQ ID NO: 10861 - protein, 15 aa, Rubus idaeus
FVLDADNLIPKIAPQ

SEQ ID NO: 10862 - protein, 15 aa, Betula verrucosa
LFKAFILDGDNLFPK

SEQ ID NO: 10863 - protein, 15 aa, Rubus idaeus
SVIPPPKLFKAFVLD

SEQ ID NO: 10864 - protein, 15 aa, Ostrya carpinifolia
KLIPKVAPQAISKVE

SEQ ID NO: 10865 - protein, 15 aa, Morus bombycis
FFKAAVLDADNLFPK

SEQ ID NO: 10866 - protein, 15 aa, Morus alba
FFKAAVLDADNLFPK

SEQ ID NO: 10867 - protein, 15 aa, Fragaria ananassa
KLFKAFVLDADNLIP

SEQ ID NO: 10868 - protein, 15 aa, Rubus idaeus
KLFKAFVLDADNLIP

SEQ ID NO: 10869 - protein, 15 aa, Prunus persica
RLFKAFVLDADNLVP

SEQ ID NO: 10870 - protein, 15 aa, Prunus persica
RLFKAFVLDADNLVP

SEQ ID NO: 10871 - protein, 15 aa, Prunus avium
GGVGTIKKVTFGEGS

SEQ ID NO: 10872 - protein, 15 aa, Glycine max
SVENVEGNGGPGTIK

SEQ ID NO: 10873 - protein, 15 aa, Morus bombycis
AAVLDADNLFPKVAP

SEQ ID NO: 10874 - protein, 15 aa, Morus alba
AAVLDADNLFPKVAP

SEQ ID NO: 10875 - protein, 15 aa, Corylus avellana
KLIPKVAPQAITSVE

SEQ ID NO: 10876 - protein, 15 aa, Malus domestica
TSEIPPSRLFKAFVL

SEQ ID NO: 10877 - protein, 15 aa, Rubus idaeus
PPPKLFKAFVLDADN

SEQ ID NO: 10878 - protein, 15 aa, Fagus sylvatica
SEIIEGSGGPGTIKK

SEQ ID NO: 10879 - protein, 15 aa, Morus bombycis
AVLDADNLFPKVAPQ

SEQ ID NO: 10880 - protein, 15 aa, Morus alba
AVLDADNLFPKVAPQ

SEQ ID NO: 10881 - protein, 15 aa, Betula platyphylla
DADNLIPKVAPENVS

SEQ ID NO: 10882 - protein, 15 aa, Alnus glutinosa
VIPAARLFKAFILDG

SEQ ID NO: 10883 - protein, 15 aa, Prunus persica
TIKKITFGEGSQYGY

SEQ ID NO: 10884 - protein, 15 aa, Prunus persica
TIKKITFGEGSQYGY

SEQ ID NO: 10885 - protein, 15 aa, Pyrus communis
TIKKITFGEGSQYGY

SEQ ID NO: 10886 - protein, 15 aa, Juglans regia
TIKKINFGEGSQYKY

SEQ ID NO: 10887 - protein, 15 aa, Betula verrucosa
FKAFILDGDNLFPKV

SEQ ID NO: 10888 - protein, 15 aa, Pyrus communis
KIAPQAIKHAEILEG

SEQ ID NO: 10889 - protein, 15 aa, Betula verrucosa
IVATPDGGSILKISN

SEQ ID NO: 10890 - protein, 15 aa, Morus alba
KAAVLDADNLFPKVA

SEQ ID NO: 10891 - protein, 15 aa, Morus bombycis
KAAVLDADNLFPKVA

SEQ ID NO: 10892 - protein, 15 aa, Juglans regia
VIPPARLFKAFVLDA

SEQ ID NO: 10893 - protein, 15 aa, Rubus idaeus
VIPPPKLFKAFVLDA

SEQ ID NO: 10894 - protein, 15 aa, Prunus persica
AFVLDADNLVPKIAP

SEQ ID NO: 10895 - protein, 15 aa, Prunus persica
AFVLDADNLVPKIAP

SEQ ID NO: 10896 - protein, 15 aa, Castanea sativa
VIPPARLFKAFVLDS

SEQ ID NO: 10897 - protein, 15 aa, Castanea sativa
PARLFKAFVLDSDNL

SEQ ID NO: 10898 - protein, 15 aa, Pyrus communis
PPRLFKAFVLDADNL

SEQ ID NO: 10899 - protein, 15 aa, Prunus persica
PPRLFKAFVLDADNL

SEQ ID NO: 10900 - protein, 15 aa, Prunus persica
PPRLFKAFVLDADNL

SEQ ID NO: 10901 - protein, 15 aa, Fragaria ananassa
TIKKITFGEGSHYGY

SEQ ID NO: 10902 - protein, 15 aa, Pyrus communis
EIPPPRLFKAFVLDA

SEQ ID NO: 10903 - protein, 15 aa, Prunus persica
EIPPPRLFKAFVLDA

SEQ ID NO: 10904 - protein, 15 aa, Prunus persica
EIPPPRLFKAFVLDA

SEQ ID NO: 10905 - protein, 15 aa, Juglans regia
PARLFKAFVLDADNL

SEQ ID NO: 10906 - protein, 15 aa, Betula platyphylla
ADNLIPKVAPENVSS

SEQ ID NO: 10907 - protein, 15 aa, Prunus persica
KAFVLDADNLVPKIA

SEQ ID NO: 10908 - protein, 15 aa, Prunus persica
KAFVLDADNLVPKIA

SEQ ID NO: 10909 - protein, 15 aa, Malus domestica
GTIKKITFGEGSQYG

SEQ ID NO: 10910 - protein, 15 aa, Prunus persica
FVLDADNLVPKIAPQ

SEQ ID NO: 10911 - protein, 15 aa, Prunus persica
FVLDADNLVPKIAPQ

SEQ ID NO: 10912 - protein, 15 aa, Carpinus betulus
SVENVGGNGGPGTIK

SEQ ID NO: 10913 - protein, 15 aa, Malus domestica
PKIAPQAIKQAEILE

SEQ ID NO: 10914 - protein, 15 aa, Betula verrucosa
LDGDNLFPKVAPQAI

SEQ ID NO: 10915 - protein, 15 aa, Prunus persica
VLDADNLVPKIAPQA

SEQ ID NO: 10916 - protein, 15 aa, Prunus persica
VLDADNLVPKIAPQA

SEQ ID NO: 10917 - protein, 15 aa, Alnus glutinosa
IVAAPDGGSILKISN

SEQ ID NO: 10918 - protein, 15 aa, Malus domestica
PPSRLFKAFVLDADN

SEQ ID NO: 10919 - protein, 15 aa, Fragaria ananassa
KIAPQAVKCAEILEG

SEQ ID NO: 10920 - protein, 15 aa, Quercus alba
GTIKKITFGEASKFK

SEQ ID NO: 10921 - protein, 15 aa, Morus alba
VLDADNLFPKVAPQA

SEQ ID NO: 10922 - protein, 15 aa, Morus bombycis
VLDADNLFPKVAPQA

SEQ ID NO: 10923 - protein, 15 aa, Morus bombycis
DNLFPKVAPQAAKSA

SEQ ID NO: 10924 - protein, 15 aa, Morus alba
DNLFPKVAPQAAKSA

SEQ ID NO: 10925 - protein, 15 aa, Alnus glutinosa
VAAPDGGSILKISNK

SEQ ID NO: 10926 - protein, 15 aa, Betula platyphylla
TIKKITFPEGSHFKY

SEQ ID NO: 10927 - protein, 15 aa, Corylus avellana
SVENVEGNGGPGTIK

SEQ ID NO: 10928 - protein, 15 aa, Betula platyphylla
SVIAPARLFKSFVLD

SEQ ID NO: 10929 - protein, 15 aa, Castanea sativa
TSVIPPARLFKAFVL

SEQ ID NO: 10930 - protein, 15 aa, Corylus avellana
VLDGDKLIPKVAPQA

SEQ ID NO: 10931 - protein, 15 aa, Ostrya carpinifolia
VLDGDKLIPKVAPQA

SEQ ID NO: 10932 - protein, 15 aa, Quercus alba
RLFKALFLDSDNLIQ

SEQ ID NO: 10933 - protein, 15 aa, Corylus avellana
YVLDGDKLIPKVAPQ

SEQ ID NO: 10934 - protein, 15 aa, Ostrya carpinifolia
YVLDGDKLIPKVAPQ

SEQ ID NO: 10935 - protein, 15 aa, Carpinus betulus
YVLDGDKLIPKVAPQ

SEQ ID NO: 10936 - protein, 15 aa, Prunus avium
SVIPPEKLFKAFILD

SEQ ID NO: 10937 - protein, 15 aa, Rubus idaeus
DNLIPKIAPQAVKSV

SEQ ID NO: 10938 - protein, 15 aa, Vigna radiata
GTIKKISFVEDGETK

SEQ ID NO: 10939 - protein, 15 aa, Carpinus betulus
VLDGDKLIPKVAPQV

SEQ ID NO: 10940 - protein, 15 aa, Betula verrucosa
SVIPAARLFKAFILD

SEQ ID NO: 10941 - protein, 15 aa, Fragaria ananassa
DNLIPKIAPQAVKCA

SEQ ID NO: 10942 - protein, 15 aa, Betula verrucosa
KAFILDGDNLFPKVA

SEQ ID NO: 10943 - protein, 15 aa, Fagus sylvatica
TVITPARLFKAFVLD

SEQ ID NO: 10944 - protein, 15 aa, Carpinus betulus
EAETPSVIPAARLFK

SEQ ID NO: 10945 - protein, 15 aa, Ostrya carpinifolia
EAETPSVIPAARLFK

SEQ ID NO: 10946 - protein, 15 aa, Alnus glutinosa
EAETPSVIPAARLFK

SEQ ID NO: 10947 - protein, 15 aa, Solanum lycopersicum
FKALVLDFDNLVPKL

SEQ ID NO: 10948 - protein, 15 aa, Glycine max
GTIKKITFLEDGETK

SEQ ID NO: 10949 - protein, 15 aa, Corylus avellana
EVETPSVIPAARLFK

SEQ ID NO: 10950 - protein, 15 aa, Prunus avium
DNLIPKVAPTAVKGT

SEQ ID NO: 10951 - protein, 15 aa, Rubus idaeus
PPKLFKAFVLDADNL

SEQ ID NO: 10952 - protein, 15 aa, Alnus glutinosa
SVENIEGNGGPGTIK

SEQ ID NO: 10953 - protein, 15 aa, Betula verrucosa
SVENIEGNGGPGTIK

SEQ ID NO: 10954 - protein, 15 aa, Quercus alba
TSVIAPARLFKALFL

SEQ ID NO: 10955 - protein, 15 aa, Prunus persica
PPPRLFKAFVLDADN

SEQ ID NO: 10956 - protein, 15 aa, Pyrus communis
PPPRLFKAFVLDADN

SEQ ID NO: 10957 - protein, 15 aa, Prunus persica
PPPRLFKAFVLDADN

SEQ ID NO: 10958 - protein, 15 aa, Corylus avellana
RLFKSYVLDGDKLIP

SEQ ID NO: 10959 - protein, 15 aa, Ostrya carpinifolia
RLFKSYVLDGDKLIP

SEQ ID NO: 10960 - protein, 15 aa, Carpinus betulus
RLFKSYVLDGDKLIP

SEQ ID NO: 10961 - protein, 15 aa, Juglans regia
IPPARLFKAFVLDAD

SEQ ID NO: 10962 - protein, 15 aa, Alnus glutinosa
PFKYVKERVDEVDRV

SEQ ID NO: 10963 - protein, 15 aa, Betula verrucosa
VIPAARLFKAFILDG

SEQ ID NO: 10964 - protein, 15 aa, Rubus idaeus
IPPPKLFKAFVLDAD

SEQ ID NO: 10965 - protein, 15 aa, Quercus alba
LFKALFLDSDNLIQK

SEQ ID NO: 10966 - protein, 15 aa, Malus domestica
SEIPPSRLFKAFVLD

SEQ ID NO: 10967 - protein, 15 aa, Vigna radiata
QSVEIVEGNGGPGTI

SEQ ID NO: 10968 - protein, 15 aa, Castanea sativa
IPPARLFKAFVLDSD

SEQ ID NO: 10969 - protein, 15 aa, Castanea sativa
ETSVIPPARLFKAFV

SEQ ID NO: 10970 - protein, 15 aa, Juglans regia
STSVIPPARLFKAFV

SEQ ID NO: 10971 - protein, 15 aa, Betula platyphylla
VIAPARLFKSFVLDA

SEQ ID NO: 10972 - protein, 15 aa, Castanea sativa
STEIIEGNGGPGTIK

SEQ ID NO: 10973 - protein, 15 aa, Quercus alba
STEIIEGNGGPGTIK

SEQ ID NO: 10974 - protein, 15 aa, Fagus sylvatica
SSEIIEGSGGPGTIK

SEQ ID NO: 10975 - protein, 15 aa, Glycine max
KSVENVEGNGGPGTI

SEQ ID NO: 10976 - protein, 15 aa, Carpinus betulus
KFVKERVDEVDNANF

SEQ ID NO: 10977 - protein, 15 aa, Prunus avium
EILEGDGGVGTIKKV

SEQ ID NO: 10978 - protein, 15 aa, Fagus sylvatica
TIKKITFGEGSQFNY

SEQ ID NO: 10979 - protein, 15 aa, Juglans regia
SSEIIEGNGGPGTIK

SEQ ID NO: 10980 - protein, 15 aa, Morus bombycis
SAETVEGNGGPGTVK

SEQ ID NO: 10981 - protein, 15 aa, Morus alba
SAETVEGNGGPGTVK

SEQ ID NO: 10982 - protein, 15 aa, Fagus sylvatica
LVASPDGGSILKSTS

SEQ ID NO: 10983 - protein, 15 aa, Malus domestica
IPPSRLFKAFVLDAD

SEQ ID NO: 10984 - protein, 15 aa, Betula platyphylla
PARLFKSFVLDADNL

SEQ ID NO: 10985 - protein, 15 aa, Fagus sylvatica
VITPARLFKAFVLDA

SEQ ID NO: 10986 - protein, 15 aa, Fragaria ananassa
PAPKLFKAFVLDADN

SEQ ID NO: 10987 - protein, 15 aa, Fragaria ananassa
LIPKIAPQAVKCAEI

SEQ ID NO: 10988 - protein, 15 aa, Fagus sylvatica
LIPKVAPQAIKSSEI

SEQ ID NO: 10989 - protein, 15 aa, Pyrus communis
LIPKIAPQAIKHAEI

SEQ ID NO: 10990 - protein, 15 aa, Alnus glutinosa
ARLFKAFILDGDKLL

SEQ ID NO: 10991 - protein, 15 aa, Fagus sylvatica
TPARLFKAFVLDADN

SEQ ID NO: 10992 - protein, 15 aa, Betula verrucosa
FILDGDNLFPKVAPQ

SEQ ID NO: 10993 - protein, 15 aa, Corylus avellana
TSVENVEGNGGPGTI

SEQ ID NO: 10994 - protein, 15 aa, Betula platyphylla
SAENIEGNGGPGTIK

SEQ ID NO: 10995 - protein, 15 aa, Betula verrucosa
SSVENIEGNGGPGTI

SEQ ID NO: 10996 - protein, 15 aa, Castanea sativa
PPARLFKAFVLDSDN

SEQ ID NO: 10997 - protein, 15 aa, Betula verrucosa
ARLFKAFILDGDNLF

SEQ ID NO: 10998 - protein, 15 aa, Malus domestica
NLIPKIAPQAIKQAE

SEQ ID NO: 10999 - protein, 15 aa, Prunus avium
PPEKLFKAFILDADN

SEQ ID NO: 11000 - protein, 15 aa, Betula verrucosa
GVFNYETETTSVIPA

SEQ ID NO: 11001 - protein, 15 aa, Corylus avellana
TIKNITFGEGSRYKY

SEQ ID NO: 11002 - protein, 15 aa, Castanea sativa
TIKKITFGEASKYKY

SEQ ID NO: 11003 - protein, 15 aa, Juglans regia
PPARLFKAFVLDADN

SEQ ID NO: 11004 - protein, 15 aa, Corylus avellana
RYKYVKERVDEVDNT

SEQ ID NO: 11005 - protein, 15 aa, Quercus alba
ETSVIAPARLFKALF

SEQ ID NO: 11006 - protein, 15 aa, Juglans regia
GVFTYETESTSVIPP

SEQ ID NO: 11007 - protein, 15 aa, Prunus avium
GVFTYETEFTSVIPP

SEQ ID NO: 11008 - protein, 15 aa, Corylus avellana
IVAAPGGGSILKISS

SEQ ID NO: 11009 - protein, 15 aa, Ostrya carpinifolia
IVAAPGGGSILKISS

SEQ ID NO: 11010 - protein, 15 aa, Betula verrucosa
DNLFPKVAPQAISSV

SEQ ID NO: 11011 - protein, 15 aa, Fagus sylvatica
ITPARLFKAFVLDAD

SEQ ID NO: 11012 - protein, 15 aa, Vigna radiata
SVEIVEGNGGPGTIK

SEQ ID NO: 11013 - protein, 15 aa, Fagus sylvatica
VASPDGGSILKSTSK

SEQ ID NO: 11014 - protein, 15 aa, Quercus alba
SVIAPARLFKALFLD

SEQ ID NO: 11015 - protein, 15 aa, Betula platyphylla
IAPARLFKSFVLDAD

SEQ ID NO: 11016 - protein, 15 aa, Malus domestica
LIPKIAPQAIKQAEI

SEQ ID NO: 11017 - protein, 15 aa, Betula platyphylla
APARLFKSFVLDADN

SEQ ID NO: 11018 - protein, 15 aa, Ostrya carpinifolia
GGNGGPGTIKNITFA

SEQ ID NO: 11019 - protein, 15 aa, Carpinus betulus
GGNGGPGTIKNITFA

SEQ ID NO: 11020 - protein, 15 aa, Betula verrucosa
VATPDGGSILKISNK

SEQ ID NO: 11021 - protein, 15 aa, Prunus persica
LVPKIAPQAIKHSEI

SEQ ID NO: 11022 - protein, 15 aa, Prunus persica
LVPKIAPQAIKHSEI

SEQ ID NO: 11023 - protein, 15 aa, Ostrya carpinifolia
VENVGGNGGPGTIKN

SEQ ID NO: 11024 - protein, 15 aa, Pyrus communis
PKIAPQAIKHAEILE

SEQ ID NO: 11025 - protein, 15 aa, Morus alba
AETVEGNGGPGTVKK

SEQ ID NO: 11026 - protein, 15 aa, Morus bombycis
AETVEGNGGPGTVKK

SEQ ID NO: 11027 - protein, 15 aa, Betula verrucosa
FNYETETTSVIPAAR

SEQ ID NO: 11028 - protein, 15 aa, Prunus persica
PKIAPQAIKHSEILE

SEQ ID NO: 11029 - protein, 15 aa, Prunus persica
PKIAPQAIKHSEILE

SEQ ID NO: 11030 - protein, 15 aa, Pyrus communis
IPKIAPQAIKHAEIL

SEQ ID NO: 11031 - protein, 15 aa, Juglans regia
LIPKVVPQAVKSSEI

SEQ ID NO: 11032 - protein, 15 aa, Juglans regia
TSVIPPARLFKAFVL

SEQ ID NO: 11033 - protein, 15 aa, Betula platyphylla
GPLGDTLEKISYEIK

SEQ ID NO: 11034 - protein, 15 aa, Carpinus betulus
DKLIPKVAPQVISSV

SEQ ID NO: 11035 - protein, 15 aa, Pyrus communis
HAEILEGNGGPGTIK

SEQ ID NO: 11036 - protein, 15 aa, Pyrus communis
AEILEGNGGPGTIKK

SEQ ID NO: 11037 - protein, 15 aa, Fragaria ananassa
SDIPAPKLFKAFVLD

SEQ ID NO: 11038 - protein, 15 aa, Prunus persica
IPPPRLFKAFVLDAD

SEQ ID NO: 11039 - protein, 15 aa, Pyrus communis
IPPPRLFKAFVLDAD

SEQ ID NO: 11040 - protein, 15 aa, Prunus persica
IPPPRLFKAFVLDAD

SEQ ID NO: 11041 - protein, 15 aa, Corylus avellana
IPKVAPQAITSVENV

SEQ ID NO: 11042 - protein, 15 aa, Prunus persica
GDALGDTLEKISYET

SEQ ID NO: 11043 - protein, 15 aa, Prunus avium
VIPPEKLFKAFILDA

SEQ ID NO: 11044 - protein, 15 aa, Betula verrucosa
TTSVIPAARLFKAFI

SEQ ID NO: 11045 - protein, 15 aa, Alnus glutinosa
GVFNYEAETPSVIPA

SEQ ID NO: 11046 - protein, 15 aa, Ostrya carpinifolia
GVFNYEAETPSVIPA

SEQ ID NO: 11047 - protein, 15 aa, Alnus glutinosa
AFILDGDKLLPKVAP

SEQ ID NO: 11048 - protein, 15 aa, Quercus alba
ASPDGGSIMKSTTKY

SEQ ID NO: 11049 - protein, 15 aa, Pyrus communis
HYHTKGDIEIKEEHV

SEQ ID NO: 11050 - protein, 15 aa, Betula platyphylla
YEDEATSVIAPARLF

SEQ ID NO: 11051 - protein, 15 aa, Actinidia chinensis
AFILDGDTLVPKVLP

SEQ ID NO: 11052 - protein, 15 aa, Prunus persica
DALGDTLEKISYETK

SEQ ID NO: 11053 - protein, 15 aa, Glycine max
FKSVENVEGNGGPGT

SEQ ID NO: 11054 - protein, 15 aa, Malus domestica
KQAEILEGNGGPGTI

SEQ ID NO: 11055 - protein, 15 aa, Malus domestica
EIPPSRLFKAFVLDA

SEQ ID NO: 11056 - protein, 15 aa, Vigna radiata
FQSVEIVEGNGGPGT

SEQ ID NO: 11057 - protein, 15 aa, Prunus avium
IPPEKLFKAFILDAD

SEQ ID NO: 11058 - protein, 15 aa, Fagus sylvatica
IPKVAPQAIKSSEII

SEQ ID NO: 11059 - protein, 15 aa, Corylus avellana
GVFNYEVETPSVIPA

SEQ ID NO: 11060 - protein, 15 aa, Betula platyphylla
GVFNYEDEATSVIAP

SEQ ID NO: 11061 - protein, 15 aa, Juglans regia
DNLIPKVVPQAVKSS

SEQ ID NO: 11062 - protein, 15 aa, Malus domestica
QAEILEGNGGPGTIK

SEQ ID NO: 11063 - protein, 15 aa, Betula platyphylla
GGPLGDTLEKISYEI

SEQ ID NO: 11064 - protein, 15 aa, Corylus avellana
DKLIPKVAPQAITSV

SEQ ID NO: 11065 - protein, 15 aa, Fragaria ananassa
CAEILEGDGGPGTIK

SEQ ID NO: 11066 - protein, 15 aa, Betula verrucosa
ETTSVIPAARLFKAF

SEQ ID NO: 11067 - protein, 15 aa, Castanea sativa
SFSVIEGDVLTDIEN

SEQ ID NO: 11068 - protein, 15 aa, Quercus alba
CVASPDGGSIMKSTT

SEQ ID NO: 11069 - protein, 15 aa, Prunus avium
VASPDGGSIVKTTSH

SEQ ID NO: 11070 - protein, 15 aa, Fragaria ananassa
KGDVEIKEEHVKAGK

SEQ ID NO: 11071 - protein, 15 aa, Prunus persica
KGDVEIKEEHVKAGK

SEQ ID NO: 11072 - protein, 15 aa, Malus domestica
GDALTDTIEKISYET

SEQ ID NO: 11073 - protein, 15 aa, Betula platyphylla
EGGPLGDTLEKISYE

SEQ ID NO: 11074 - protein, 15 aa, Prunus avium
HYHTKGDVEIKEEQV

SEQ ID NO: 11075 - protein, 15 aa, Prunus persica
HYHTKGDVEIKEEHV

SEQ ID NO: 11076 - protein, 15 aa, Prunus avium
KGDVEIKEEQVKAGK

SEQ ID NO: 11077 - protein, 15 aa, Prunus persica
LVASPSGGSIIKSTS

SEQ ID NO: 11078 - protein, 15 aa, Prunus persica
LVASPSGGSIIKSTS

SEQ ID NO: 11079 - protein, 15 aa, Juglans regia
HYHSKGDHEIKEEDV

SEQ ID NO: 11080 - protein, 15 aa, Prunus persica
EGDALGDTLEKISYE

SEQ ID NO: 11081 - protein, 15 aa, Malus domestica
SHYHTKGNIEIKEEH

SEQ ID NO: 11082 - protein, 15 aa, Betula platyphylla
KYHTKGDISLNEEEI

SEQ ID NO: 11083 - protein, 15 aa, Pyrus communis
DALTDTIEKISYEAK

SEQ ID NO: 11084 - protein, 15 aa, Actinidia deliciosa
IVATPDGGCICKNRS

SEQ ID NO: 11085 - protein, 15 aa, Prunus persica
HSEILEGDGGPGTIK

SEQ ID NO: 11086 - protein, 15 aa, Prunus persica
HSEILEGDGGPGTIK

SEQ ID NO: 11087 - protein, 15 aa, Rubus idaeus
DALGDKIEKISYEIK

SEQ ID NO: 11088 - protein, 15 aa, Pyrus communis
SHYHTKGDIEIKEEH

SEQ ID NO: 11089 - protein, 15 aa, Juglans regia
ESTSVIPPARLFKAF

SEQ ID NO: 11090 - protein, 15 aa, Malus domestica
TKGNIEIKEEHVKVG

SEQ ID NO: 11091 - protein, 15 aa, Alnus glutinosa
SSVENIEGNGGPGTI

SEQ ID NO: 11092 - protein, 15 aa, Malus domestica
ISHYHTKGNIEIKEE

SEQ ID NO: 11093 - protein, 15 aa, Prunus persica
HYHTKGNVEIKEEHV

SEQ ID NO: 11094 - protein, 15 aa, Prunus persica
KGNVEIKEEHVKAGK

SEQ ID NO: 11095 - protein, 15 aa, Fragaria ananassa
KYHTKGDVEIKEEHV

SEQ ID NO: 11096 - protein, 15 aa, Carpinus betulus
KLIPKVAPQVISSVE

SEQ ID NO: 11097 - protein, 15 aa, Pyrus communis
KGDIEIKEEHVKAGK

SEQ ID NO: 11098 - protein, 15 aa, Prunus persica
TSHYHTKGDVEIKEE

SEQ ID NO: 11099 - protein, 15 aa, Prunus persica
DALGDNLEKISYETK

SEQ ID NO: 11100 - protein, 15 aa, Juglans regia
SHYHSKGDHEIKEED

SEQ ID NO: 11101 - protein, 15 aa, Prunus persica
VASPSGGSIIKSTSH

SEQ ID NO: 11102 - protein, 15 aa, Prunus persica
VASPSGGSIIKSTSH

SEQ ID NO: 11103 - protein, 15 aa, Actinidia chinensis
IVACPDGGSICKNRS

SEQ ID NO: 11104 - protein, 15 aa, Prunus avium
LVASPDGGSIVKTTS

SEQ ID NO: 11105 - protein, 15 aa, Betula platyphylla
SSAENIEGNGGPGTI

SEQ ID NO: 11106 - protein, 15 aa, Castanea sativa
QETSVIPPARLFKAF

SEQ ID NO: 11107 - protein, 15 aa, Alnus glutinosa
KAFILDGDKLLPKVA

SEQ ID NO: 11108 - protein, 15 aa, Juglans regia
KVVPQAVKSSEIIEG

SEQ ID NO: 11109 - protein, 15 aa, Castanea sativa
AIKSTEIIEGNGGPG

SEQ ID NO: 11110 - protein, 15 aa, Quercus alba
AIKSTEIIEGNGGPG

SEQ ID NO: 11111 - protein, 15 aa, Prunus persica
YHTKGDVEIKEEHVK

SEQ ID NO: 11112 - protein, 15 aa, Fragaria ananassa
YHTKGDVEIKEEHVK

SEQ ID NO: 11113 - protein, 15 aa, Malus domestica
DTIEKISYETKLVAC

SEQ ID NO: 11114 - protein, 15 aa, Malus domestica
HTKGNIEIKEEHVKV

SEQ ID NO: 11115 - protein, 15 aa, Actinidia deliciosa
TLEGDGGVGTIKLTT

SEQ ID NO: 11116 - protein, 15 aa, Alnus glutinosa
APDGGSILKISNKFH

SEQ ID NO: 11117 - protein, 15 aa, Prunus persica
EGDALGDNLEKISYE

SEQ ID NO: 11118 - protein, 15 aa, Malus domestica
YHTKGNIEIKEEHVK

SEQ ID NO: 11119 - protein, 15 aa, Betula verrucosa
IKIVATPDGGSILKI

SEQ ID NO: 11120 - protein, 15 aa, Malus domestica
HYHTKGNIEIKEEHV

SEQ ID NO: 11121 - protein, 15 aa, Betula verrucosa
ETETTSVIPAARLFK

SEQ ID NO: 11122 - protein, 15 aa, Prunus persica
STSHYHTKGDVEIKE

SEQ ID NO: 11123 - protein, 15 aa, Juglans regia
AVKSSEIIEGNGGPG

SEQ ID NO: 11124 - protein, 15 aa, Arachis hypogaea
KSVEIVEGNGGPGTI

SEQ ID NO: 11125 - protein, 15 aa, Fragaria ananassa
SKYHTKGDVEIKEEH

SEQ ID NO: 11126 - protein, 15 aa, Fagus sylvatica
AIKSSEIIEGSGGPG

SEQ ID NO: 11127 - protein, 15 aa, Fragaria ananassa
HTKGDVEIKEEHVKA

SEQ ID NO: 11128 - protein, 15 aa, Prunus persica
HTKGDVEIKEEHVKA

SEQ ID NO: 11129 - protein, 15 aa, Juglans regia
QAVKSSEIIEGNGGP

SEQ ID NO: 11130 - protein, 15 aa, Pyrus communis
GDALTDTIEKISYEA

SEQ ID NO: 11131 - protein, 15 aa, Pyrus communis
HTKGDIEIKEEHVKA

SEQ ID NO: 11132 - protein, 15 aa, Pyrus communis
TKGDIEIKEEHVKAG

SEQ ID NO: 11133 - protein, 15 aa, Prunus persica
SHYHTKGNVEIKEEH

SEQ ID NO: 11134 - protein, 15 aa, Betula verrucosa
KIVATPDGGSILKIS

SEQ ID NO: 11135 - protein, 15 aa, Alnus glutinosa
LKISNKFHTKGDHEI

SEQ ID NO: 11136 - protein, 15 aa, Alnus glutinosa
ILKISNKFHTKGDHE

SEQ ID NO: 11137 - protein, 15 aa, Prunus persica
GDALGDNLEKISYET

SEQ ID NO: 11138 - protein, 15 aa, Alnus glutinosa
SILKISNKFHTKGDH

SEQ ID NO: 11139 - protein, 15 aa, Fagus sylvatica
QAIKSSEIIEGSGGP

SEQ ID NO: 11140 - protein, 15 aa, Ostrya carpinifolia
PGGGSILKISSKFHA

SEQ ID NO: 11141 - protein, 15 aa, Corylus avellana
PGGGSILKISSKFHA

SEQ ID NO: 11142 - protein, 15 aa, Prunus persica
HTKGNVEIKEEHVKA

SEQ ID NO: 11143 - protein, 15 aa, Quercus alba
QETSVIAPARLFKAL

SEQ ID NO: 11144 - protein, 15 aa, Actinidia chinensis
KIVACPDGGSICKNR

SEQ ID NO: 11145 - protein, 15 aa, Castanea sativa
IPKVLPQAIKSTEII

SEQ ID NO: 11146 - protein, 15 aa, Corylus avellana
VETPSVIPAARLFKS

SEQ ID NO: 11147 - protein, 15 aa, Alnus glutinosa
KIVAAPDGGSILKIS

SEQ ID NO: 11148 - protein, 15 aa, Alnus glutinosa
TPSVIPAARLFKAFI

SEQ ID NO: 11149 - protein, 12 aa, Vigna radiata
FKAVEAYLLANP

SEQ ID NO: 11150 - protein, 15 aa, Ostrya carpinifolia
SKVENVGGNGGPGTI

SEQ ID NO: 11151 - protein, 15 aa, Rubus idaeus
GDALGDKIEKISYEI

SEQ ID NO: 11152 - protein, 15 aa, Fragaria ananassa
IPKIAPQAVKCAEIL

SEQ ID NO: 11153 - protein, 15 aa, Alnus glutinosa
AETPSVIPAARLFKA

SEQ ID NO: 11154 - protein, 15 aa, Carpinus betulus
AETPSVIPAARLFKS

SEQ ID NO: 11155 - protein, 15 aa, Ostrya carpinifolia
AETPSVIPAARLFKS

SEQ ID NO: 11156 - protein, 15 aa, Quercus alba
IQKVLPQAIKSTEII

SEQ ID NO: 11157 - protein, 15 aa, Juglans regia
TESTSVIPPARLFKA

SEQ ID NO: 11158 - protein, 15 aa, Prunus persica
TKGNVEIKEEHVKAG

SEQ ID NO: 11159 - protein, 15 aa, Carpinus betulus
IVAAPGGGSIVKISS

SEQ ID NO: 11160 - protein, 15 aa, Prunus avium
SHYHTKGDVEIKEEQ

SEQ ID NO: 11161 - protein, 15 aa, Prunus persica
SHYHTKGDVEIKEEH

SEQ ID NO: 11162 - protein, 15 aa, Fagus sylvatica
PKVAPQAIKSSEIIE

SEQ ID NO: 11163 - protein, 15 aa, Rubus idaeus
AVKSVEIIEGDGGVG

SEQ ID NO: 11164 - protein, 15 aa, Glycine max
FKAIEAYLLAHPDYN

SEQ ID NO: 11165 - protein, 15 aa, Prunus persica
YHTKGNVEIKEEHVK

SEQ ID NO: 11166 - protein, 15 aa, Ostrya carpinifolia
KERVDEVDNANFKYN

SEQ ID NO: 11167 - protein, 15 aa, Carpinus betulus
KERVDEVDNANFKYN

SEQ ID NO: 11168 - protein, 15 aa, Quercus alba
NLIQKVLPQAIKSTE

SEQ ID NO: 11169 - protein, 15 aa, Betula platyphylla
EDEATSVIAPARLFK

SEQ ID NO: 11170 - protein, 15 aa, Prunus avium
YHTKGDVEIKEEQVK

SEQ ID NO: 11171 - protein, 15 aa, Prunus persica
GDTLEKISYETKLVA

SEQ ID NO: 11172 - protein, 15 aa, Betula platyphylla
IVAAPGGGSILKITS

SEQ ID NO: 11173 - protein, 15 aa, Corylus avellana
KERVDEVDNTNFTYS

SEQ ID NO: 11174 - protein, 15 aa, Pyrus communis
YHTKGDIEIKEEHVK

SEQ ID NO: 11175 - protein, 15 aa, Fagus sylvatica
IKLVASPDGGSILKS

SEQ ID NO: 11176 - protein, 15 aa, Castanea sativa
QAIKSTEIIEGNGGP

SEQ ID NO: 11177 - protein, 15 aa, Quercus alba
QAIKSTEIIEGNGGP

SEQ ID NO: 11178 - protein, 15 aa, Prunus persica
GDNLEKISYETKLVA

SEQ ID NO: 11179 - protein, 15 aa, Fagus sylvatica
SKYHTKGDHEIKEDQ

SEQ ID NO: 11180 - protein, 15 aa, Prunus persica
TKGDVEIKEEHVKAG

SEQ ID NO: 11181 - protein, 15 aa, Fragaria ananassa
TKGDVEIKEEHVKAG

SEQ ID NO: 11182 - protein, 15 aa, Alnus glutinosa
GSILKISNKFHTKGD

SEQ ID NO: 11183 - protein, 15 aa, Prunus avium
TKGDVEIKEEQVKAG

SEQ ID NO: 11184 - protein, 15 aa, Rubus idaeus
KIEKISYEIKLVASG

SEQ ID NO: 11185 - protein, 15 aa, Prunus persica
TSEIPPPRLFKAFVL

SEQ ID NO: 11186 - protein, 15 aa, Pyrus communis
TSEIPPPRLFKAFVL

SEQ ID NO: 11187 - protein, 15 aa, Prunus persica
TSEIPPPRLFKAFVL

SEQ ID NO: 11188 - protein, 15 aa, Betula platyphylla
KIVAAPGGGSILKIT

SEQ ID NO: 11189 - protein, 15 aa, Actinidia deliciosa
KIVATPDGGCICKNR

SEQ ID NO: 11190 - protein, 15 aa, Prunus avium
HTKGDVEIKEEQVKA

SEQ ID NO: 11191 - protein, 15 aa, Pyrus communis
TIEKISYEAKLVASG

SEQ ID NO: 11192 - protein, 15 aa, Betula platyphylla
PGGGSILKITSKYHT

SEQ ID NO: 11193 - protein, 15 aa, Juglans regia
ETESTSVIPPARLFK

SEQ ID NO: 11194 - protein, 15 aa, Corylus avellana
PKVAPQAITSVENVE

SEQ ID NO: 11195 - protein, 15 aa, Rubus idaeus
QAVKSVEIIEGDGGV

SEQ ID NO: 11196 - protein, 15 aa, Betula platyphylla
GSILKITSKYHTKGD

SEQ ID NO: 11197 - protein, 15 aa, Alnus glutinosa
DGGSILKISNKFHTK

SEQ ID NO: 11198 - protein, 15 aa, Malus domestica
FTSEIPPSRLFKAFV

SEQ ID NO: 11199 - protein, 15 aa, Pyrus communis
EGDALTDTIEKISYE

SEQ ID NO: 11200 - protein, 15 aa, Malus domestica
EGDALTDTIEKISYE

SEQ ID NO: 11201 - protein, 15 aa, Malus domestica
IEGDALTDTIEKISY

SEQ ID NO: 11202 - protein, 15 aa, Betula verrucosa
SVIEGGPIGDTLEKI

SEQ ID NO: 11203 - protein, 15 aa, Carpinus betulus
TPSVIPAARLFKSYV

SEQ ID NO: 11204 - protein, 15 aa, Ostrya carpinifolia
TPSVIPAARLFKSYV

SEQ ID NO: 11205 - protein, 15 aa, Corylus avellana
TPSVIPAARLFKSYV

SEQ ID NO: 11206 - protein, 15 aa, Betula verrucosa
TETTSVIPAARLFKA

SEQ ID NO: 11207 - protein, 15 aa, Alnus glutinosa
IKIVAAPDGGSILKI

SEQ ID NO: 11208 - protein, 15 aa, Alnus glutinosa
VSSVENIEGNGGPGT

SEQ ID NO: 11209 - protein, 15 aa, Quercus alba
IKCVASPDGGSIMKS

SEQ ID NO: 11210 - protein, 15 aa, Prunus persica
NLEKISYETKLVASP

SEQ ID NO: 11211 - protein, 15 aa, Corylus avellana
LRAVETYLLAHSAEY

SEQ ID NO: 11212 - protein, 15 aa, Castanea sativa
KSTEIIEGNGGPGTI

SEQ ID NO: 11213 - protein, 15 aa, Quercus alba
KSTEIIEGNGGPGTI

SEQ ID NO: 11214 - protein, 15 aa, Corylus avellana
LLRAVETYLLAHSAE

SEQ ID NO: 11215 - protein, 15 aa, Carpinus betulus
GDKLIPKVAPQVISS

SEQ ID NO: 11216 - protein, 15 aa, Carpinus betulus
KVAPQVISSVENVGG

SEQ ID NO: 11217 - protein, 15 aa, Quercus alba
QKVLPQAIKSTEIIE

SEQ ID NO: 11218 - protein, 15 aa, Ostrya carpinifolia
LLRAVESYLLAHTAE

SEQ ID NO: 11219 - protein, 15 aa, Carpinus betulus
LLRAVESYLLAHTAE

SEQ ID NO: 11220 - protein, 15 aa, Corylus avellana
KVAPQAITSVENVEG

SEQ ID NO: 11221 - protein, 15 aa, Betula verrucosa
TLLRAVESYLLAHSD

SEQ ID NO: 11222 - protein, 15 aa, Betula platyphylla
VSSAENIEGNGGPGT

SEQ ID NO: 11223 - protein, 15 aa, Juglans regia
FKAVEGYLLAHPDAY

SEQ ID NO: 11224 - protein, 15 aa, Ostrya carpinifolia
FVKERVDEVDNANFK

SEQ ID NO: 11225 - protein, 15 aa, Carpinus betulus
FVKERVDEVDNANFK

SEQ ID NO: 11226 - protein, 15 aa, Carpinus betulus
PGGGSIVKISSKFHA

SEQ ID NO: 11227 - protein, 15 aa, Malus domestica
EFTSEIPPSRLFKAF

SEQ ID NO: 11228 - protein, 15 aa, Fragaria ananassa
PKIAPQAVKCAEILE

SEQ ID NO: 11229 - protein, 15 aa, Carpinus betulus
LRAVESYLLAHTAEY

SEQ ID NO: 11230 - protein, 15 aa, Ostrya carpinifolia
LRAVESYLLAHTAEY

SEQ ID NO: 11231 - protein, 15 aa, Castanea sativa
LIPKVLPQAIKSTEI

SEQ ID NO: 11232 - protein, 15 aa, Prunus persica
GNVEIKEEHVKAGKE

SEQ ID NO: 11233 - protein, 15 aa, Corylus avellana
GGGSILKISSKFHAK

SEQ ID NO: 11234 - protein, 15 aa, Ostrya carpinifolia
GGGSILKISSKFHAK

SEQ ID NO: 11235 - protein, 15 aa, Prunus persica
TLEKISYETKLVASP

SEQ ID NO: 11236 - protein, 15 aa, Alnus glutinosa
NYEAETPSVIPAARL

SEQ ID NO: 11237 - protein, 15 aa, Ostrya carpinifolia
NYEAETPSVIPAARL

SEQ ID NO: 11238 - protein, 15 aa, Carpinus betulus
NYEAETPSVIPAARL

SEQ ID NO: 11239 - protein, 15 aa, Prunus persica
GVFTYESEFTSEIPP

SEQ ID NO: 11240 - protein, 15 aa, Prunus persica
GVFTYESEFTSEIPP

SEQ ID NO: 11241 - protein, 15 aa, Prunus avium
FTYETEFTSVIPPEK

SEQ ID NO: 11242 - protein, 15 aa, Pyrus communis
DIEIKEEHVKAGKEK

SEQ ID NO: 11243 - protein, 15 aa, Betula platyphylla
SILKITSKYHTKGDI

SEQ ID NO: 11244 - protein, 15 aa, Alnus glutinosa
KVAPEAVSSVENIEG

SEQ ID NO: 11245 - protein, 15 aa, Betula verrucosa
NYETETTSVIPAARL

SEQ ID NO: 11246 - protein, 15 aa, Prunus persica
DTLEKISYETKLVAS

SEQ ID NO: 11247 - protein, 15 aa, Prunus persica
FTYESEFTSEIPPPR

SEQ ID NO: 11248 - protein, 15 aa, Prunus persica
FTYESEFTSEIPPPR

SEQ ID NO: 11249 - protein, 15 aa, Carpinus betulus
DGDKLIPKVAPQVIS

SEQ ID NO: 11250 - protein, 15 aa, Corylus avellana
NYEVETPSVIPAARL

SEQ ID NO: 11251 - protein, 15 aa, Betula platyphylla
AAPGGGSILKITSKY

SEQ ID NO: 11252 - protein, 15 aa, Betula verrucosa
YETETTSVIPAARLF

SEQ ID NO: 11253 - protein, 15 aa, Rubus idaeus
GDKIEKISYEIKLVA

SEQ ID NO: 11254 - protein, 15 aa, Betula verrucosa
YVKDRVDEVDHTNFK

SEQ ID NO: 11255 - protein, 15 aa, Betula platyphylla
APGGGSILKITSKYH

SEQ ID NO: 11256 - protein, 15 aa, Fragaria ananassa
GDVEIKEEHVKAGKE

SEQ ID NO: 11257 - protein, 15 aa, Prunus persica
GDVEIKEEHVKAGKE

SEQ ID NO: 11258 - protein, 15 aa, Prunus persica
LGDNLEKISYETKLV

SEQ ID NO: 11259 - protein, 15 aa, Rubus idaeus
VEIIEGDGGVGTVKK

SEQ ID NO: 11260 - protein, 15 aa, Fagus sylvatica
YHTKGDHEIKEDQIK

SEQ ID NO: 11261 - protein, 15 aa, Juglans regia
KSSEIIEGNGGPGTI

SEQ ID NO: 11262 - protein, 15 aa, Prunus persica
LGDTLEKISYETKLV

SEQ ID NO: 11263 - protein, 15 aa, Juglans regia
VFTYETESTSVIPPA

SEQ ID NO: 11264 - protein, 15 aa, Prunus persica
NVEIKEEHVKAGKEK

SEQ ID NO: 11265 - protein, 15 aa, Carpinus betulus
AEGIPFKFVKERVDE

SEQ ID NO: 11266 - protein, 15 aa, Fagus sylvatica
IKSSEIIEGSGGPGT

SEQ ID NO: 11267 - protein, 15 aa, Prunus persica
KIAPQAIKHSEILEG

SEQ ID NO: 11268 - protein, 15 aa, Prunus persica
KIAPQAIKHSEILEG

SEQ ID NO: 11269 - protein, 15 aa, Juglans regia
FTYETESTSVIPPAR

SEQ ID NO: 11270 - protein, 15 aa, Corylus avellana
YVKERVDEVDNTNFT

SEQ ID NO: 11271 - protein, 15 aa, Betula platyphylla
ILKITSKYHTKGDIS

SEQ ID NO: 11272 - protein, 15 aa, Ostrya carpinifolia
KLLRAVESYLLAHTA

SEQ ID NO: 11273 - protein, 15 aa, Carpinus betulus
KLLRAVESYLLAHTA

SEQ ID NO: 11274 - protein, 15 aa, Castanea sativa
FKAVEAYLLANPDLY

SEQ ID NO: 11275 - protein, 15 aa, Alnus glutinosa
LKAVESYLLAHSDAY

SEQ ID NO: 11276 - protein, 15 aa, Prunus persica
ASPSGGSIIKSTSHY

SEQ ID NO: 11277 - protein, 15 aa, Prunus persica
ASPSGGSIIKSTSHY

SEQ ID NO: 11278 - protein, 15 aa, Betula verrucosa
SKEMGETLLRAVESY

SEQ ID NO: 11279 - protein, 15 aa, Juglans regia
FTYAYSVIEGDALAD

SEQ ID NO: 11280 - protein, 15 aa, Alnus glutinosa
SPFKYVKERVDEVDR

SEQ ID NO: 11281 - protein, 15 aa, Ostrya carpinifolia
AAPGGGSILKISSKF

SEQ ID NO: 11282 - protein, 15 aa, Corylus avellana
AAPGGGSILKISSKF

SEQ ID NO: 11283 - protein, 15 aa, Betula verrucosa
LRAVESYLLAHSDAY

SEQ ID NO: 11284 - protein, 15 aa, Pyrus communis
DTIEKISYEAKLVAS

SEQ ID NO: 11285 - protein, 15 aa, Prunus avium
GDVEIKEEQVKAGKE

SEQ ID NO: 11286 - protein, 15 aa, Carpinus betulus
YEAETPSVIPAARLF

SEQ ID NO: 11287 - protein, 15 aa, Alnus glutinosa
YEAETPSVIPAARLF

SEQ ID NO: 11288 - protein, 15 aa, Ostrya carpinifolia
YEAETPSVIPAARLF

SEQ ID NO: 11289 - protein, 15 aa, Prunus avium
ASPDGGSIVKTTSHY

SEQ ID NO: 11290 - protein, 15 aa, Ostrya carpinifolia
KVENVGGNGGPGTIK

SEQ ID NO: 11291 - protein, 15 aa, Castanea sativa
KATGLFKAVEAYLLA

SEQ ID NO: 11292 - protein, 15 aa, Betula platyphylla
SIIEGGPLGDTLEKI

SEQ ID NO: 11293 - protein, 15 aa, Betula verrucosa
ETLLRAVESYLLAHS

SEQ ID NO: 11294 - protein, 15 aa, Fagus sylvatica
GSILKSTSKYHTKGD

SEQ ID NO: 11295 - protein, 15 aa, Prunus avium
DVEIKEEQVKAGKEK

SEQ ID NO: 11296 - protein, 15 aa, Carpinus betulus
APGGGSIVKISSKFH

SEQ ID NO: 11297 - protein, 15 aa, Alnus glutinosa
ETPSVIPAARLFKAF

SEQ ID NO: 11298 - protein, 15 aa, Alnus glutinosa
FNYEAETPSVIPAAR

SEQ ID NO: 11299 - protein, 15 aa, Ostrya carpinifolia
FNYEAETPSVIPAAR

SEQ ID NO: 11300 - protein, 15 aa, Carpinus betulus
FNYEAETPSVIPAAR

SEQ ID NO: 11301 - protein, 15 aa, Fagus sylvatica
KSSEIIEGSGGPGTI

SEQ ID NO: 11302 - protein, 15 aa, Morus alba
ETVEGNGGPGTVKKI

SEQ ID NO: 11303 - protein, 15 aa, Morus bombycis
ETVEGNGGPGTVKKI

SEQ ID NO: 11304 - protein, 15 aa, Betula verrucosa
KVAPQAISSVENIEG

SEQ ID NO: 11305 - protein, 15 aa, Betula verrucosa
KEMGETLLRAVESYL

SEQ ID NO: 11306 - protein, 15 aa, Prunus avium
IKLVASPDGGSIVKT

SEQ ID NO: 11307 - protein, 15 aa, Corylus avellana
EKLLRAVETYLLAHS

SEQ ID NO: 11308 - protein, 15 aa, Malus domestica
ALTDTIEKISYETKL

SEQ ID NO: 11309 - protein, 15 aa, Ostrya carpinifolia
VAAPGGGSILKISSK

SEQ ID NO: 11310 - protein, 15 aa, Corylus avellana
VAAPGGGSILKISSK

SEQ ID NO: 11311 - protein, 15 aa, Actinidia deliciosa
RASGIFKKVEAYLLA

SEQ ID NO: 11312 - protein, 15 aa, Juglans regia
KASGLFKAVEGYLLA

SEQ ID NO: 11313 - protein, 15 aa, Pyrus communis
GDIEIKEEHVKAGKE

SEQ ID NO: 11314 - protein, 15 aa, Morus alba
KSAETVEGNGGPGTV

SEQ ID NO: 11315 - protein, 15 aa, Morus bombycis
KSAETVEGNGGPGTV

SEQ ID NO: 11316 - protein, 15 aa, Prunus persica
FTSEIPPPRLFKAFV

SEQ ID NO: 11317 - protein, 15 aa, Prunus persica
FTSEIPPPRLFKAFV

SEQ ID NO: 11318 - protein, 15 aa, Pyrus communis
FTSEIPPPRLFKAFV

SEQ ID NO: 11319 - protein, 15 aa, Ostrya carpinifolia
KEMAEKLLRAVESYL

SEQ ID NO: 11320 - protein, 15 aa, Carpinus betulus
KEMAEKLLRAVESYL

SEQ ID NO: 11321 - protein, 15 aa, Castanea sativa
PKVLPQAIKSTEIIE

SEQ ID NO: 11322 - protein, 15 aa, Juglans regia
VKSSEIIEGNGGPGT

SEQ ID NO: 11323 - protein, 15 aa, Carpinus betulus
AAPGGGSIVKISSKF

SEQ ID NO: 11324 - protein, 15 aa, Corylus avellana
APGGGSILKISSKFH

SEQ ID NO: 11325 - protein, 15 aa, Ostrya carpinifolia
APGGGSILKISSKFH

SEQ ID NO: 11326 - protein, 15 aa, Alnus glutinosa
GSPFKYVKERVDEVD

SEQ ID NO: 11327 - protein, 15 aa, Juglans regia
IPKVVPQAVKSSEII

SEQ ID NO: 11328 - protein, 15 aa, Fagus sylvatica
EASGIFKAVEAYLLA

SEQ ID NO: 11329 - protein, 15 aa, Carpinus betulus
VAAPGGGSIVKISSK

SEQ ID NO: 11330 - protein, 15 aa, Corylus avellana
KLLRAVETYLLAHSA

SEQ ID NO: 11331 - protein, 15 aa, Betula platyphylla
GDTLEKISYEIKIVA

SEQ ID NO: 11332 - protein, 15 aa, Malus domestica
TDTIEKISYETKLVA

SEQ ID NO: 11333 - protein, 15 aa, Carpinus betulus
ISSVENVGGNGGPGT

SEQ ID NO: 11334 - protein, 15 aa, Quercus alba
IKSTEIIEGNGGPGT

SEQ ID NO: 11335 - protein, 15 aa, Castanea sativa
IKSTEIIEGNGGPGT

SEQ ID NO: 11336 - protein, 15 aa, Carpinus betulus
GGGSIVKISSKFHAK

SEQ ID NO: 11337 - protein, 15 aa, Alnus glutinosa
YVKERVDEVDRVNFK

SEQ ID NO: 11338 - protein, 15 aa, Actinidia deliciosa
GDGGVGTIKLTTFGE

SEQ ID NO: 11339 - protein, 15 aa, Prunus persica
DVEIKEEHVKAGKEK

SEQ ID NO: 11340 - protein, 15 aa, Fragaria ananassa
DVEIKEEHVKAGKEK

SEQ ID NO: 11341 - protein, 15 aa, Ostrya carpinifolia
KVAPQAISKVENVGG

SEQ ID NO: 11342 - protein, 15 aa, Alnus glutinosa
FKYVKERVDEVDRVN

SEQ ID NO: 11343 - protein, 15 aa, Ostrya carpinifolia
EKLLRAVESYLLAHT

SEQ ID NO: 11344 - protein, 15 aa, Carpinus betulus
EKLLRAVESYLLAHT

SEQ ID NO: 11345 - protein, 15 aa, Fagus sylvatica
ASPDGGSILKSTSKY

SEQ ID NO: 11346 - protein, 15 aa, Carpinus betulus
ETPSVIPAARLFKSY

SEQ ID NO: 11347 - protein, 15 aa, Ostrya carpinifolia
ETPSVIPAARLFKSY

SEQ ID NO: 11348 - protein, 15 aa, Corylus avellana
ETPSVIPAARLFKSY

SEQ ID NO: 11349 - protein, 15 aa, Betula platyphylla
VAAPGGGSILKITSK

SEQ ID NO: 11350 - protein, 15 aa, Malus domestica
IPKIAPQAIKQAEIL

SEQ ID NO: 11351 - protein, 15 aa, Betula platyphylla
PLGDTLEKISYEIKI

SEQ ID NO: 11352 - protein, 15 aa, Corylus avellana
YEVETPSVIPAARLF

SEQ ID NO: 11353 - protein, 15 aa, Alnus glutinosa
PDGGSILKISNKFHT

SEQ ID NO: 11354 - protein, 15 aa, Prunus persica
VPKIAPQAIKHSEIL

SEQ ID NO: 11355 - protein, 15 aa, Prunus persica
VPKIAPQAIKHSEIL

SEQ ID NO: 11356 - protein, 15 aa, Corylus avellana
KEMAEKLLRAVETYL

SEQ ID NO: 11357 - protein, 15 aa, Actinidia chinensis
VACPDGGSICKNRSI

SEQ ID NO: 11358 - protein, 15 aa, Actinidia deliciosa
VATPDGGCICKNRSI

SEQ ID NO: 11359 - protein, 15 aa, Corylus avellana
FNYEVETPSVIPAAR

SEQ ID NO: 11360 - protein, 15 aa, Alnus glutinosa
AAPDGGSILKISNKF

SEQ ID NO: 11361 - protein, 15 aa, Alnus glutinosa
ISNKFHTKGDHEINA

SEQ ID NO: 11362 - protein, 15 aa, Carpinus betulus
SIVKISSKFHAKGYH

SEQ ID NO: 11363 - protein, 15 aa, Carpinus betulus
YNYTVIEGDVLGDKL

SEQ ID NO: 11364 - protein, 15 aa, Ostrya carpinifolia
YNYTVIEGDVLGDKL

SEQ ID NO: 11365 - protein, 15 aa, Fragaria ananassa
TSKYHTKGDVEIKEE

SEQ ID NO: 11366 - protein, 15 aa, Juglans regia
SISHYHSKGDHEIKE

SEQ ID NO: 11367 - protein, 15 aa, Betula verrucosa
ILKISNKYHTKGDHE

SEQ ID NO: 11368 - protein, 15 aa, Betula verrucosa
PKVAPQAISSVENIE

SEQ ID NO: 11369 - protein, 15 aa, Betula verrucosa
MGETLLRAVESYLLA

SEQ ID NO: 11370 - protein, 15 aa, Malus domestica
LTDTIEKISYETKLV

SEQ ID NO: 11371 - protein, 15 aa, Carpinus betulus
IVKISSKFHAKGYHE

SEQ ID NO: 11372 - protein, 15 aa, Betula platyphylla
NLIPKVAPENVSSAE

SEQ ID NO: 11373 - protein, 15 aa, Prunus avium
NLIPKVAPTAVKGTE

SEQ ID NO: 11374 - protein, 15 aa, Corylus avellana
YKYVKERVDEVDNTN

SEQ ID NO: 11375 - protein, 15 aa, Carpinus betulus
FAEGIPFKFVKERVD

SEQ ID NO: 11376 - protein, 15 aa, Castanea sativa
KVLPQAIKSTEIIEG

SEQ ID NO: 11377 - protein, 15 aa, Malus domestica
SISHYHTKGNIEIKE

SEQ ID NO: 11378 - protein, 15 aa, Carpinus betulus
GGSIVKISSKFHAKG

SEQ ID NO: 11379 - protein, 15 aa, Fagus sylvatica
SILKSTSKYHTKGDH

SEQ ID NO: 11380 - protein, 15 aa, Betula verrucosa
KKISFPEGFPFKYVK

SEQ ID NO: 11381 - protein, 15 aa, Alnus glutinosa
APEAVSSVENIEGNG

SEQ ID NO: 11382 - protein, 15 aa, Prunus persica
IAPQAIKHSEILEGD

SEQ ID NO: 11383 - protein, 15 aa, Prunus persica
IAPQAIKHSEILEGD

SEQ ID NO: 11384 - protein, 15 aa, Alnus glutinosa
KKITFPEGSPFKYVK

SEQ ID NO: 11385 - protein, 15 aa, Betula verrucosa
FKYNYSVIEGGPIGD

SEQ ID NO: 11386 - protein, 15 aa, Morus alba
KAEGLFKLVEGYLEA

SEQ ID NO: 11387 - protein, 15 aa, Morus bombycis
KAEGLFKLVEGYLEA

SEQ ID NO: 11388 - protein, 15 aa, Malus domestica
KSISHYHTKGNIEIK

SEQ ID NO: 11389 - protein, 15 aa, Betula verrucosa
SILKISNKYHTKGDH

SEQ ID NO: 11390 - protein, 15 aa, Fagus sylvatica
VAPQAIKSSEIIEGS

SEQ ID NO: 11391 - protein, 15 aa, Juglans regia
KIEKISYETKIVASH

SEQ ID NO: 11392 - protein, 15 aa, Alnus glutinosa
LLKAVESYLLAHSDA

SEQ ID NO: 11393 - protein, 15 aa, Ostrya carpinifolia
NFKYNYTVIEGDVLG

SEQ ID NO: 11394 - protein, 15 aa, Carpinus betulus
NFKYNYTVIEGDVLG

SEQ ID NO: 11395 - protein, 15 aa, Carpinus betulus
ISSKFHAKGYHEVNA

SEQ ID NO: 11396 - protein, 15 aa, Ostrya carpinifolia
FAEGSPFKFVKERVD

SEQ ID NO: 11397 - protein, 15 aa, Prunus persica
GSIIKSTSHYHTKGD

SEQ ID NO: 11398 - protein, 15 aa, Ostrya carpinifolia
SILKISSKFHAKGDH

SEQ ID NO: 11399 - protein, 15 aa, Corylus avellana
SILKISSKFHAKGDH

SEQ ID NO: 11400 - protein, 15 aa, Carpinus betulus
FKYNYTVIEGDVLGD

SEQ ID NO: 11401 - protein, 15 aa, Ostrya carpinifolia
FKYNYTVIEGDVLGD

SEQ ID NO: 11402 - protein, 15 aa, Corylus avellana
AARLFKSYVLDGDKL

SEQ ID NO: 11403 - protein, 15 aa, Carpinus betulus
AARLFKSYVLDGDKL

SEQ ID NO: 11404 - protein, 15 aa, Ostrya carpinifolia
AARLFKSYVLDGDKL

SEQ ID NO: 11405 - protein, 15 aa, Alnus glutinosa
KERVDEVDRVNFKYS

SEQ ID NO: 11406 - protein, 15 aa, Corylus avellana
ISSKFHAKGDHEINA

SEQ ID NO: 11407 - protein, 15 aa, Corylus avellana
KISSKFHAKGDHEIN

SEQ ID NO: 11408 - protein, 15 aa, Corylus avellana
FTYSYTVIEGDVLGD

SEQ ID NO: 11409 - protein, 15 aa, Juglans regia
GLFKAVEGYLLAHPD

SEQ ID NO: 11410 - protein, 15 aa, Juglans regia
VVPQAVKSSEIIEGN

SEQ ID NO: 11411 - protein, 15 aa, Ostrya carpinifolia
IPKVAPQAISKVENV

SEQ ID NO: 11412 - protein, 15 aa, Rubus idaeus
TSVIPPPKLFKAFVL

SEQ ID NO: 11413 - protein, 15 aa, Alnus glutinosa
KYVKERVDEVDRVNF

SEQ ID NO: 11414 - protein, 15 aa, Corylus avellana
NFTYSYTVIEGDVLG

SEQ ID NO: 11415 - protein, 15 aa, Betula platyphylla
LKITSKYHTKGDISL

SEQ ID NO: 11416 - protein, 15 aa, Prunus persica
ALGDNLEKISYETKL

SEQ ID NO: 11417 - protein, 15 aa, Alnus glutinosa
PEGSPFKYVKERVDE

SEQ ID NO: 11418 - protein, 15 aa, Corylus avellana
GGSILKISSKFHAKG

SEQ ID NO: 11419 - protein, 15 aa, Ostrya carpinifolia
GGSILKISSKFHAKG

SEQ ID NO: 11420 - protein, 15 aa, Pyrus communis
ISHYHTKGDIEIKEE

SEQ ID NO: 11421 - protein, 15 aa, Betula verrucosa
ILDGDNLFPKVAPQA

SEQ ID NO: 11422 - protein, 15 aa, Rubus idaeus
IAPQAVKSVEIIEGD

SEQ ID NO: 11423 - protein, 15 aa, Malus domestica
KIAPQAIKQAEILEG

SEQ ID NO: 11424 - protein, 15 aa, Corylus avellana
MAEKLLRAVETYLLA

SEQ ID NO: 11425 - protein, 15 aa, Ostrya carpinifolia
LKISSKFHAKGDHEV

SEQ ID NO: 11426 - protein, 15 aa, Betula verrucosa
GGPIGDTLEKISNEI

SEQ ID NO: 11427 - protein, 15 aa, Fagus sylvatica
PQAIKSSEIIEGSGG

SEQ ID NO: 11428 - protein, 15 aa, Ostrya carpinifolia
EMAEKLLRAVESYLL

SEQ ID NO: 11429 - protein, 15 aa, Carpinus betulus
EMAEKLLRAVESYLL

SEQ ID NO: 11430 - protein, 15 aa, Prunus persica
GSIIKSTSHYHTKGN

SEQ ID NO: 11431 - protein, 15 aa, Ostrya carpinifolia
FKFVKERVDEVDNAN

SEQ ID NO: 11432 - protein, 15 aa, Carpinus betulus
PFKFVKERVDEVDNA

SEQ ID NO: 11433 - protein, 15 aa, Carpinus betulus
GSIVKISSKFHAKGY

SEQ ID NO: 11434 - protein, 15 aa, Carpinus betulus
VKISSKFHAKGYHEV

SEQ ID NO: 11435 - protein, 15 aa, Ostrya carpinifolia
GSILKISSKFHAKGD

SEQ ID NO: 11436 - protein, 15 aa, Corylus avellana
GSILKISSKFHAKGD

SEQ ID NO: 11437 - protein, 15 aa, Ostrya carpinifolia
GTIKNITFAEGSPFK

SEQ ID NO: 11438 - protein, 15 aa, Alnus glutinosa
EAVSSVENIEGNGGP

SEQ ID NO: 11439 - protein, 15 aa, Quercus alba
YSFSVIEGDALTVME

SEQ ID NO: 11440 - protein, 15 aa, Carpinus betulus
LIPKVAPQVISSVEN

SEQ ID NO: 11441 - protein, 15 aa, Malus domestica
DALTDTIEKISYETK

SEQ ID NO: 11442 - protein, 15 aa, Rubus idaeus
DKIEKISYEIKLVAS

SEQ ID NO: 11443 - protein, 15 aa, Betula verrucosa
GETLLRAVESYLLAH

SEQ ID NO: 11444 - protein, 15 aa, Pyrus communis
SISHYHTKGDIEIKE

SEQ ID NO: 11445 - protein, 15 aa, Ostrya carpinifolia
NITFAEGSPFKFVKE

SEQ ID NO: 11446 - protein, 15 aa, Carpinus betulus
NITFAEGIPFKFVKE

SEQ ID NO: 11447 - protein, 15 aa, Quercus alba
DSDNLIQKVLPQAIK

SEQ ID NO: 11448 - protein, 15 aa, Actinidia deliciosa
ENFTYSYSIIEGGAL

SEQ ID NO: 11449 - protein, 15 aa, Betula verrucosa
EMGETLLRAVESYLL

SEQ ID NO: 11450 - protein, 15 aa, Prunus avium
TSHYHTKGDVEIKEE

SEQ ID NO: 11451 - protein, 15 aa, Fagus sylvatica
ILKSTSKYHTKGDHE

SEQ ID NO: 11452 - protein, 15 aa, Betula verrucosa
FPKVAPQAISSVENI

SEQ ID NO: 11453 - protein, 15 aa, Pyrus communis
IAPQAIKHAEILEGN

SEQ ID NO: 11454 - protein, 15 aa, Ostrya carpinifolia
ISSKFHAKGDHEVNA

SEQ ID NO: 11455 - protein, 15 aa, Juglans regia
ISHYHSKGDHEIKEE

SEQ ID NO: 11456 - protein, 15 aa, Corylus avellana
EMAEKLLRAVETYLL

SEQ ID NO: 11457 - protein, 15 aa, Fagus sylvatica
GGSILKSTSKYHTKG

SEQ ID NO: 11458 - protein, 15 aa, Castanea sativa
VLPQAIKSTEIIEGN

SEQ ID NO: 11459 - protein, 15 aa, Quercus alba
VLPQAIKSTEIIEGN

SEQ ID NO: 11460 - protein, 15 aa, Juglans regia
PKVVPQAVKSSEIIE

SEQ ID NO: 11461 - protein, 15 aa, Ostrya carpinifolia
LIPKVAPQAISKVEN

SEQ ID NO: 11462 - protein, 15 aa, Fagus sylvatica
PDGGSILKSTSKYHT

SEQ ID NO: 11463 - protein, 15 aa, Ostrya carpinifolia
KISSKFHAKGDHEVN

SEQ ID NO: 11464 - protein, 15 aa, Actinidia chinensis
KAFILDGDTLVPKVL

SEQ ID NO: 11465 - protein, 15 aa, Ostrya carpinifolia
AEKLLRAVESYLLAH

SEQ ID NO: 11466 - protein, 15 aa, Carpinus betulus
AEKLLRAVESYLLAH

SEQ ID NO: 11467 - protein, 15 aa, Betula platyphylla
IKIVAAPGGGSILKI

SEQ ID NO: 11468 - protein, 15 aa, Actinidia chinensis
LTYSYTIIEGDVLAE

SEQ ID NO: 11469 - protein, 15 aa, Carpinus betulus
IPKVAPQVISSVENV

SEQ ID NO: 11470 - protein, 15 aa, Corylus avellana
LKISSKFHAKGDHEI

SEQ ID NO: 11471 - protein, 15 aa, Carpinus betulus
MAEKLLRAVESYLLA

SEQ ID NO: 11472 - protein, 15 aa, Ostrya carpinifolia
MAEKLLRAVESYLLA

SEQ ID NO: 11473 - protein, 15 aa, Corylus avellana
LIPKVAPQAITSVEN

SEQ ID NO: 11474 - protein, 15 aa, Juglans regia
SKGDHEIKEEDVKDG

SEQ ID NO: 11475 - protein, 15 aa, Prunus persica
ALGDTLEKISYETKL

SEQ ID NO: 11476 - protein, 15 aa, Ostrya carpinifolia
ILKISSKFHAKGDHE

SEQ ID NO: 11477 - protein, 15 aa, Corylus avellana
ILKISSKFHAKGDHE

SEQ ID NO: 11478 - protein, 15 aa, Quercus alba
DNLIQKVLPQAIKST

SEQ ID NO: 11479 - protein, 15 aa, Corylus avellana
SYTVIEGDVLGDKLE

SEQ ID NO: 11480 - protein, 15 aa, Corylus avellana
KYVKERVDEVDNTNF

SEQ ID NO: 11481 - protein, 15 aa, Fagus sylvatica
KVAPQAIKSSEIIEG

SEQ ID NO: 11482 - protein, 15 aa, Actinidia chinensis
ILDGDTLVPKVLPHA

SEQ ID NO: 11483 - protein, 15 aa, Carpinus betulus
SKFHAKGYHEVNAEK

SEQ ID NO: 11484 - protein, 15 aa, Alnus glutinosa
PSVIPAARLFKAFIL

SEQ ID NO: 11485 - protein, 15 aa, Betula verrucosa
LKISNKYHTKGDHEV

SEQ ID NO: 11486 - protein, 15 aa, Betula verrucosa
NFKYNYSVIEGGPIG

SEQ ID NO: 11487 - protein, 15 aa, Fagus sylvatica
TSKYHTKGDHEIKED

SEQ ID NO: 11488 - protein, 15 aa, Alnus glutinosa
IKKITFPEGSPFKYV

SEQ ID NO: 11489 - protein, 15 aa, Quercus alba
SDNLIQKVLPQAIKS

SEQ ID NO: 11490 - protein, 15 aa, Corylus avellana
QAITSVENVEGNGGP

SEQ ID NO: 11491 - protein, 15 aa, Prunus persica
DNLEKISYETKLVAS

SEQ ID NO: 11492 - protein, 15 aa, Betula verrucosa
KISNEIKIVATPDGG

SEQ ID NO: 11493 - protein, 15 aa, Alnus glutinosa
KITFPEGSPFKYVKE

SEQ ID NO: 11494 - protein, 15 aa, Ostrya carpinifolia
SYVLDGDKLIPKVAP

SEQ ID NO: 11495 - protein, 15 aa, Carpinus betulus
SYVLDGDKLIPKVAP

SEQ ID NO: 11496 - protein, 15 aa, Corylus avellana
SYVLDGDKLIPKVAP

SEQ ID NO: 11497 - protein, 15 aa, Carpinus betulus
SSKFHAKGYHEVNAE

SEQ ID NO: 11498 - protein, 15 aa, Ostrya carpinifolia
EGSPFKFVKERVDEV

SEQ ID NO: 11499 - protein, 15 aa, Alnus glutinosa
FKAFILDGDKLLPKV

SEQ ID NO: 11500 - protein, 15 aa, Ostrya carpinifolia
ANFKYNYTVIEGDVL

SEQ ID NO: 11501 - protein, 15 aa, Carpinus betulus
ANFKYNYTVIEGDVL

SEQ ID NO: 11502 - protein, 15 aa, Ostrya carpinifolia
SKFHAKGDHEVNAEE

SEQ ID NO: 11503 - protein, 15 aa, Betula platyphylla
DEIDHANFKYCYSII

SEQ ID NO: 11504 - protein, 15 aa, Corylus avellana
SKFHAKGDHEINAEE

SEQ ID NO: 11505 - protein, 15 aa, Quercus alba
SPDGGSIMKSTTKYQ

SEQ ID NO: 11506 - protein, 15 aa, Ostrya carpinifolia
AEGSPFKFVKERVDE

SEQ ID NO: 11507 - protein, 15 aa, Betula platyphylla
DTLEKISYEIKIVAA

SEQ ID NO: 11508 - protein, 15 aa, Fragaria ananassa
TTSKYHTKGDVEIKE

SEQ ID NO: 11509 - protein, 15 aa, Prunus persica
LEKISYETKLVASPS

SEQ ID NO: 11510 - protein, 15 aa, Ostrya carpinifolia
RAVESYLLAHTAEYN

SEQ ID NO: 11511 - protein, 15 aa, Carpinus betulus
RAVESYLLAHTAEYN

SEQ ID NO: 11512 - protein, 15 aa, Corylus avellana
AKGDHEINAEEMKGA

SEQ ID NO: 11513 - protein, 15 aa, Carpinus betulus
VIPAARLFKSYVLDG

SEQ ID NO: 11514 - protein, 15 aa, Ostrya carpinifolia
VIPAARLFKSYVLDG

SEQ ID NO: 11515 - protein, 15 aa, Corylus avellana
VIPAARLFKSYVLDG

SEQ ID NO: 11516 - protein, 15 aa, Castanea sativa
YSFSVIEGDVLTDIE

SEQ ID NO: 11517 - protein, 15 aa, Carpinus betulus
IPFKFVKERVDEVDN

SEQ ID NO: 11518 - protein, 15 aa, Corylus avellana
YTVIEGDVLGDKLEK

SEQ ID NO: 11519 - protein, 15 aa, Ostrya carpinifolia
YTVIEGDVLGDKLEK

SEQ ID NO: 11520 - protein, 15 aa, Carpinus betulus
YTVIEGDVLGDKLEK

SEQ ID NO: 11521 - protein, 15 aa, Ostrya carpinifolia
TIKNITFAEGSPFKF

SEQ ID NO: 11522 - protein, 15 aa, Corylus avellana
SSKFHAKGDHEINAE

SEQ ID NO: 11523 - protein, 15 aa, Actinidia deliciosa
FTYSYSIIEGGALDV

SEQ ID NO: 11524 - protein, 15 aa, Carpinus betulus
VAPQVISSVENVGGN

SEQ ID NO: 11525 - protein, 15 aa, Ostrya carpinifolia
GSPFKFVKERVDEVD

SEQ ID NO: 11526 - protein, 15 aa, Prunus avium
EFTSVIPPEKLFKAF

SEQ ID NO: 11527 - protein, 15 aa, Betula verrucosa
QAISSVENIEGNGGP

SEQ ID NO: 11528 - protein, 15 aa, Apium graveolens
GPGTLKIITLPDGGP

SEQ ID NO: 11529 - protein, 14 aa, Carpinus betulus
AVESYLLAHTAEYN

SEQ ID NO: 11530 - protein, 14 aa, Ostrya carpinifolia
AVESYLLAHTAEYN

SEQ ID NO: 11531 - protein, 15 aa, Alnus glutinosa
GGSILKISNKFHTKG

SEQ ID NO: 11532 - protein, 14 aa, Glycine max
KAIEAYLLAHPDYN

SEQ ID NO: 11533 - protein, 15 aa, Corylus avellana
YSYTVIEGDVLGDKL

SEQ ID NO: 11534 - protein, 15 aa, Fagus sylvatica
ESETTTVITPARLFK

SEQ ID NO: 11535 - protein, 15 aa, Carpinus betulus
KISSKFHAKGYHEVN

SEQ ID NO: 11536 - protein, 15 aa, Betula verrucosa
EGGPIGDTLEKISNE

SEQ ID NO: 11537 - protein, 15 aa, Carpinus betulus
EVDNANFKYNYTVIE

SEQ ID NO: 11538 - protein, 15 aa, Ostrya carpinifolia
EVDNANFKYNYTVIE

SEQ ID NO: 11539 - protein, 15 aa, Betula platyphylla
GGSILKITSKYHTKG

SEQ ID NO: 11540 - protein, 15 aa, Fagus sylvatica
LEKIAYEIKLVASPD

SEQ ID NO: 11541 - protein, 15 aa, Ostrya carpinifolia
VAPQAISKVENVGGN

SEQ ID NO: 11542 - protein, 15 aa, Alnus glutinosa
AARLFKAFILDGDKL

SEQ ID NO: 11543 - protein, 15 aa, Ostrya carpinifolia
SPFKFVKERVDEVDN

SEQ ID NO: 11544 - protein, 15 aa, Prunus persica
SIIKSTSHYHTKGDV

SEQ ID NO: 11545 - protein, 15 aa, Ostrya carpinifolia
KYNYTVIEGDVLGDK

SEQ ID NO: 11546 - protein, 15 aa, Carpinus betulus
KYNYTVIEGDVLGDK

SEQ ID NO: 11547 - protein, 15 aa, Carpinus betulus
SVIPAARLFKSYVLD

SEQ ID NO: 11548 - protein, 15 aa, Ostrya carpinifolia
SVIPAARLFKSYVLD

SEQ ID NO: 11549 - protein, 15 aa, Corylus avellana
SVIPAARLFKSYVLD

SEQ ID NO: 11550 - protein, 15 aa, Betula verrucosa
DTLEKISNEIKIVAT

SEQ ID NO: 11551 - protein, 15 aa, Betula verrucosa
GGSILKISNKYHTKG

SEQ ID NO: 11552 - protein, 15 aa, Betula platyphylla
TSVIAPARLFKSFVL

SEQ ID NO: 11553 - protein, 15 aa, Corylus avellana
RAVETYLLAHSAEYN

SEQ ID NO: 11554 - protein, 14 aa, Juglans regia
AVEGYLLAHPDAYN

SEQ ID NO: 11555 - protein, 15 aa, Corylus avellana
APQAITSVENVEGNG

SEQ ID NO: 11556 - protein, 15 aa, Juglans regia
DEANFTYAYSVIEGD

SEQ ID NO: 11557 - protein, 15 aa, Carpinus betulus
EGIPFKFVKERVDEV

SEQ ID NO: 11558 - protein, 14 aa, Alnus glutinosa
AVESYLLAHSDAYN

SEQ ID NO: 11559 - protein, 15 aa, Carpinus betulus
FKFVKERVDEVDNAN

SEQ ID NO: 11560 - protein, 15 aa, Ostrya carpinifolia
PFKFVKERVDEVDNA

SEQ ID NO: 11561 - protein, 15 aa, Carpinus betulus
IPAARLFKSYVLDGD

SEQ ID NO: 11562 - protein, 15 aa, Ostrya carpinifolia
IPAARLFKSYVLDGD

SEQ ID NO: 11563 - protein, 15 aa, Corylus avellana
IPAARLFKSYVLDGD

SEQ ID NO: 11564 - protein, 15 aa, Ostrya carpinifolia
KSYVLDGDKLIPKVA

SEQ ID NO: 11565 - protein, 15 aa, Carpinus betulus
KSYVLDGDKLIPKVA

SEQ ID NO: 11566 - protein, 15 aa, Corylus avellana
KSYVLDGDKLIPKVA

SEQ ID NO: 11567 - protein, 15 aa, Carpinus betulus
ARLFKSYVLDGDKLI

SEQ ID NO: 11568 - protein, 15 aa, Ostrya carpinifolia
ARLFKSYVLDGDKLI

SEQ ID NO: 11569 - protein, 15 aa, Corylus avellana
ARLFKSYVLDGDKLI

SEQ ID NO: 11570 - protein, 15 aa, Alnus glutinosa
KISNKFHTKGDHEIN

SEQ ID NO: 11571 - protein, 15 aa, Alnus glutinosa
IPAARLFKAFILDGD

SEQ ID NO: 11572 - protein, 15 aa, Betula verrucosa
IPAARLFKAFILDGD

SEQ ID NO: 11573 - protein, 15 aa, Corylus avellana
PSVIPAARLFKSYVL

SEQ ID NO: 11574 - protein, 15 aa, Ostrya carpinifolia
PSVIPAARLFKSYVL

SEQ ID NO: 11575 - protein, 15 aa, Carpinus betulus
PSVIPAARLFKSYVL

SEQ ID NO: 11576 - protein, 15 aa, Carpinus betulus
TIKNITFAEGIPFKF

SEQ ID NO: 11577 - protein, 15 aa, Betula verrucosa
TSVIPAARLFKAFIL

SEQ ID NO: 11578 - protein, 15 aa, Rubus idaeus
EKISYEIKLVASGRG

SEQ ID NO: 11579 - protein, 15 aa, Betula verrucosa
AARLFKAFILDGDNL

SEQ ID NO: 11580 - protein, 14 aa, Corylus avellana
AVETYLLAHSAEYN

SEQ ID NO: 11581 - protein, 15 aa, Betula verrucosa
IGDTLEKISNEIKIV

SEQ ID NO: 11582 - protein, 15 aa, Betula verrucosa
KISNKYHTKGDHEVK

SEQ ID NO: 11583 - protein, 15 aa, Juglans regia
PQAVKSSEIIEGNGG

SEQ ID NO: 11584 - protein, 15 aa, Carpinus betulus
AKGYHEVNAEKMKGA

SEQ ID NO: 11585 - protein, 15 aa, Betula verrucosa
HTKGDHEVKAEQVKA

SEQ ID NO: 11586 - protein, 15 aa, Corylus avellana
TYSYTVIEGDVLGDK

SEQ ID NO: 11587 - protein, 11 aa, Vigna radiata
KAVEAYLLANP

SEQ ID NO: 11588 - protein, 15 aa, Ostrya carpinifolia
AKGDHEVNAEEMKGA

SEQ ID NO: 11589 - protein, 15 aa, Betula platyphylla
KITSKYHTKGDISLN

SEQ ID NO: 11590 - protein, 15 aa, Corylus avellana
PAARLFKSYVLDGDK

SEQ ID NO: 11591 - protein, 15 aa, Ostrya carpinifolia
PAARLFKSYVLDGDK

SEQ ID NO: 11592 - protein, 15 aa, Carpinus betulus
PAARLFKSYVLDGDK

SEQ ID NO: 11593 - protein, 15 aa, Betula platyphylla
YSIIEGGPLGDTLEK

SEQ ID NO: 11594 - protein, 15 aa, Betula verrucosa
DHTNFKYNYSVIEGG

SEQ ID NO: 11595 - protein, 15 aa, Morus bombycis
GPGTVKKITLPDGKY

SEQ ID NO: 11596 - protein, 15 aa, Morus alba
GPGTVKKITLPDGKY

SEQ ID NO: 11597 - protein, 15 aa, Alnus glutinosa
FILDGDKLLPKVAPE

SEQ ID NO: 11598 - protein, 15 aa, Corylus avellana
AKEMAEKLLRAVETY

SEQ ID NO: 11599 - protein, 15 aa, Carpinus betulus
NYTVIEGDVLGDKLE

SEQ ID NO: 11600 - protein, 15 aa, Ostrya carpinifolia
NYTVIEGDVLGDKLE

SEQ ID NO: 11601 - protein, 15 aa, Carpinus betulus
GIPFKFVKERVDEVD

SEQ ID NO: 11602 - protein, 15 aa, Fagus sylvatica
STSKYHTKGDHEIKE

SEQ ID NO: 11603 - protein, 15 aa, Prunus avium
KAAGLFKLVEAYLLA

SEQ ID NO: 11604 - protein, 15 aa, Corylus avellana
FKSYVLDGDKLIPKV

SEQ ID NO: 11605 - protein, 15 aa, Carpinus betulus
FKSYVLDGDKLIPKV

SEQ ID NO: 11606 - protein, 15 aa, Ostrya carpinifolia
FKSYVLDGDKLIPKV

SEQ ID NO: 11607 - protein, 15 aa, Betula verrucosa
GSILKISNKYHTKGD

SEQ ID NO: 11608 - protein, 15 aa, Betula verrucosa
APQAISSVENIEGNG

SEQ ID NO: 11609 - protein, 15 aa, Juglans regia
KAVEGYLLAHPDAYN

SEQ ID NO: 11610 - protein, 15 aa, Prunus avium
FTSVIPPEKLFKAFI

SEQ ID NO: 11611 - protein, 15 aa, Ostrya carpinifolia
GAKEMAEKLLRAVES

SEQ ID NO: 11612 - protein, 15 aa, Carpinus betulus
GAKEMAEKLLRAVES

SEQ ID NO: 11613 - protein, 15 aa, Prunus persica
IIKSTSHYHTKGDVE

SEQ ID NO: 11614 - protein, 15 aa, Fagus sylvatica
KSTSKYHTKGDHEIK

SEQ ID NO: 11615 - protein, 15 aa, Betula platyphylla
LGDTLEKISYEIKIV

SEQ ID NO: 11616 - protein, 15 aa, Corylus avellana
GAKEMAEKLLRAVET

SEQ ID NO: 11617 - protein, 15 aa, Ostrya carpinifolia
SSKFHAKGDHEVNAE

SEQ ID NO: 11618 - protein, 15 aa, Betula verrucosa
VKASKEMGETLLRAV

SEQ ID NO: 11619 - protein, 15 aa, Quercus alba
LIQKVLPQAIKSTEI

SEQ ID NO: 11620 - protein, 15 aa, Rubus idaeus
LIPKIAPQAVKSVEI

SEQ ID NO: 11621 - protein, 15 aa, Fagus sylvatica
LKSTSKYHTKGDHEI

SEQ ID NO: 11622 - protein, 15 aa, Morus alba
TLPDGKYVKQRLDSI

SEQ ID NO: 11623 - protein, 15 aa, Morus bombycis
TLPDGKYVKQRLDSI

SEQ ID NO: 11624 - protein, 15 aa, Betula verrucosa
EGFPFKYVKDRVDEV

SEQ ID NO: 11625 - protein, 15 aa, Morus alba
LPDGKYVKQRLDSID

SEQ ID NO: 11626 - protein, 15 aa, Morus bombycis
LPDGKYVKQRLDSID

SEQ ID NO: 11627 - protein, 15 aa, Corylus avellana
PQAITSVENVEGNGG

SEQ ID NO: 11628 - protein, 15 aa, Betula platyphylla
TLEKISYEIKIVAAP

SEQ ID NO: 11629 - protein, 15 aa, Alnus glutinosa
PAARLFKAFILDGDK

SEQ ID NO: 11630 - protein, 15 aa, Carpinus betulus
VISSVENVGGNGGPG

SEQ ID NO: 11631 - protein, 15 aa, Carpinus betulus
QVISSVENVGGNGGP

SEQ ID NO: 11632 - protein, 15 aa, Betula verrucosa
TIKKISFPEGFPFKY

SEQ ID NO: 11633 - protein, 15 aa, Betula platyphylla
VAPENVSSAENIEGN

SEQ ID NO: 11634 - protein, 15 aa, Betula platyphylla
IKKITFPEGSHFKYM

SEQ ID NO: 11635 - protein, 15 aa, Betula verrucosa
PAARLFKAFILDGDN

SEQ ID NO: 11636 - protein, 15 aa, Glycine max
IKKITFLEDGETKFV

SEQ ID NO: 11637 - protein, 15 aa, Ostrya carpinifolia
VDEVDNANFKYNYTV

SEQ ID NO: 11638 - protein, 15 aa, Carpinus betulus
VDEVDNANFKYNYTV

SEQ ID NO: 11639 - protein, 15 aa, Vigna radiata
KSDALFKAVEAYLLA

SEQ ID NO: 11640 - protein, 15 aa, Fagus sylvatica
DGGSILKSTSKYHTK

SEQ ID NO: 11641 - protein, 15 aa, Glycine max
ADALFKAIEAYLLAH

SEQ ID NO: 11642 - protein, 15 aa, Alnus glutinosa
EGSPFKYVKERVDEV

SEQ ID NO: 11643 - protein, 15 aa, Morus alba
FKAAVLDADNLFPKV

SEQ ID NO: 11644 - protein, 15 aa, Morus bombycis
FKAAVLDADNLFPKV

SEQ ID NO: 11645 - protein, 15 aa, Juglans regia
TYAYSVIEGDALADK

SEQ ID NO: 11646 - protein, 15 aa, Quercus alba
SQETSVIAPARLFKA

SEQ ID NO: 11647 - protein, 15 aa, Morus alba
PKVAPQAAKSAETVE

SEQ ID NO: 11648 - protein, 15 aa, Morus bombycis
PKVAPQAAKSAETVE

SEQ ID NO: 11649 - protein, 15 aa, Glycine max
KADALFKAIEAYLLA

SEQ ID NO: 11650 - protein, 15 aa, Betula verrucosa
GFPFKYVKDRVDEVD

SEQ ID NO: 11651 - protein, 15 aa, Actinidia deliciosa
SGIFKKVEAYLLANP

SEQ ID NO: 11652 - protein, 15 aa, Alnus glutinosa
VAPEAVSSVENIEGN

SEQ ID NO: 11653 - protein, 15 aa, Quercus alba
ESQETSVIAPARLFK

SEQ ID NO: 11654 - protein, 15 aa, Betula platyphylla
IEGGPLGDTLEKISY

SEQ ID NO: 11655 - protein, 15 aa, Betula platyphylla
EKISYEIKIVAAPGG

SEQ ID NO: 11656 - protein, 15 aa, Alnus glutinosa
ITFPEGSPFKYVKER

SEQ ID NO: 11657 - protein, 15 aa, Betula verrucosa
VIEGGPIGDTLEKIS

SEQ ID NO: 11658 - protein, 15 aa, Ostrya carpinifolia
RVDEVDNANFKYNYT

SEQ ID NO: 11659 - protein, 15 aa, Carpinus betulus
RVDEVDNANFKYNYT

SEQ ID NO: 11660 - protein, 15 aa, Juglans regia
ANFTYAYSVIEGDAL

SEQ ID NO: 11661 - protein, 15 aa, Betula platyphylla
ENVSSAENIEGNGGP

SEQ ID NO: 11662 - protein, 15 aa, Carpinus betulus
APQVISSVENVGGNG

SEQ ID NO: 11663 - protein, 15 aa, Juglans regia
YETESTSVIPPARLF

SEQ ID NO: 11664 - protein, 15 aa, Castanea sativa
SPDGGTIMKSTTKYQ

SEQ ID NO: 11665 - protein, 15 aa, Betula platyphylla
NVSSAENIEGNGGPG

SEQ ID NO: 11666 - protein, 15 aa, Corylus avellana
AITSVENVEGNGGPG

SEQ ID NO: 11667 - protein, 15 aa, Alnus glutinosa
AVSSVENIEGNGGPG

SEQ ID NO: 11668 - protein, 15 aa, Ostrya carpinifolia
QAISKVENVGGNGGP

SEQ ID NO: 11669 - protein, 15 aa, Fagus sylvatica
ASGIFKAVEAYLLAN

SEQ ID NO: 11670 - protein, 15 aa, Betula verrucosa
PEGFPFKYVKDRVDE

SEQ ID NO: 11671 - protein, 15 aa, Betula verrucosa
IKKISFPEGFPFKYV

SEQ ID NO: 11672 - protein, 15 aa, Alnus glutinosa
KAVESYLLAHSDAYN

SEQ ID NO: 11673 - protein, 15 aa, Carpinus betulus
DNANFKYNYTVIEGD

SEQ ID NO: 11674 - protein, 15 aa, Ostrya carpinifolia
DNANFKYNYTVIEGD

SEQ ID NO: 11675 - protein, 15 aa, Ostrya carpinifolia
APQAISKVENVGGNG

SEQ ID NO: 11676 - protein, 15 aa, Fragaria ananassa
IPAPKLFKAFVLDAD

SEQ ID NO: 11677 - protein, 15 aa, Betula verrucosa
KISFPEGFPFKYVKD

SEQ ID NO: 11678 - protein, 15 aa, Betula verrucosa
EKISNEIKIVATPDG

SEQ ID NO: 11679 - protein, 15 aa, Rubus idaeus
IPKIAPQAVKSVEII

SEQ ID NO: 11680 - protein, 15 aa, Betula verrucosa
AISSVENIEGNGGPG

SEQ ID NO: 11681 - protein, 15 aa, Corylus avellana
EGSRYKYVKERVDEV

SEQ ID NO: 11682 - protein, 15 aa, Castanea sativa
ESQETSVIPPARLFK

SEQ ID NO: 11683 - protein, 15 aa, Betula verrucosa
DGGSILKISNKYHTK

SEQ ID NO: 11684 - protein, 15 aa, Betula verrucosa
LEKISNEIKIVATPD

SEQ ID NO: 11685 - protein, 15 aa, Betula platyphylla
LEKISYEIKIVAAPG

SEQ ID NO: 11686 - protein, 15 aa, Ostrya carpinifolia
AISKVENVGGNGGPG

SEQ ID NO: 11687 - protein, 14 aa, Betula verrucosa
AVESYLLAHSDAYN

SEQ ID NO: 11688 - protein, 15 aa, Rubus idaeus
EIIEGDGGVGTVKKI

SEQ ID NO: 11689 - protein, 15 aa, Betula verrucosa
FPFKYVKDRVDEVDH

SEQ ID NO: 11690 - protein, 15 aa, Juglans regia
ASGLFKAVEGYLLAH

SEQ ID NO: 11691 - protein, 15 aa, Betula platyphylla
IIEGGPLGDTLEKIS

SEQ ID NO: 11692 - protein, 15 aa, Morus alba
LFPKVAPQAAKSAET

SEQ ID NO: 11693 - protein, 15 aa, Morus bombycis
LFPKVAPQAAKSAET

SEQ ID NO: 11694 - protein, 15 aa, Corylus avellana
TNFTYSYTVIEGDVL

SEQ ID NO: 11695 - protein, 15 aa, Carpinus betulus
DEVDNANFKYNYTVI

SEQ ID NO: 11696 - protein, 15 aa, Ostrya carpinifolia
DEVDNANFKYNYTVI

SEQ ID NO: 11697 - protein, 15 aa, Carpinus betulus
PQVISSVENVGGNGG

SEQ ID NO: 11698 - protein, 15 aa, Morus bombycis
FPKVAPQAAKSAETV

SEQ ID NO: 11699 - protein, 15 aa, Morus alba
FPKVAPQAAKSAETV

SEQ ID NO: 11700 - protein, 15 aa, Betula verrucosa
PQAISSVENIEGNGG

SEQ ID NO: 11701 - protein, 15 aa, Juglans regia
YAYSVIEGDALADKI

SEQ ID NO: 11702 - protein, 15 aa, Castanea sativa
SQETSVIPPARLFKA

SEQ ID NO: 11703 - protein, 15 aa, Corylus avellana
SRYKYVKERVDEVDN

SEQ ID NO: 11704 - protein, 15 aa, Betula platyphylla
APENVSSAENIEGNG

SEQ ID NO: 11705 - protein, 15 aa, Betula verrucosa
VKDRVDEVDHTNFKY

SEQ ID NO: 11706 - protein, 15 aa, Vigna radiata
IKKISFVEDGETKFV

SEQ ID NO: 11707 - protein, 15 aa, Fagus sylvatica
SPDGGSILKSTSKYH

SEQ ID NO: 11708 - protein, 15 aa, Carpinus betulus
NANFKYNYTVIEGDV

SEQ ID NO: 11709 - protein, 15 aa, Ostrya carpinifolia
NANFKYNYTVIEGDV

SEQ ID NO: 11710 - protein, 15 aa, Morus alba
KVAPQAAKSAETVEG

SEQ ID NO: 11711 - protein, 15 aa, Morus bombycis
KVAPQAAKSAETVEG

SEQ ID NO: 11712 - protein, 15 aa, Betula verrucosa
TPDGGSILKISNKYH

SEQ ID NO: 11713 - protein, 15 aa, Betula verrucosa
PFKYVKDRVDEVDHT

SEQ ID NO: 11714 - protein, 15 aa, Ostrya carpinifolia
KFVKERVDEVDNANF

SEQ ID NO: 11715 - protein, 15 aa, Castanea sativa
ASPDGGTIMKSTTKY

SEQ ID NO: 11716 - protein, 15 aa, Betula verrucosa
EVDHTNFKYNYSVIE

SEQ ID NO: 11717 - protein, 15 aa, Ostrya carpinifolia
ISKVENVGGNGGPGT

SEQ ID NO: 11718 - protein, 15 aa, Betula verrucosa
RAVESYLLAHSDAYN

SEQ ID NO: 11719 - protein, 15 aa, Betula platyphylla
KITFPEGSHFKYMKH

SEQ ID NO: 11720 - protein, 15 aa, Betula verrucosa
VDHTNFKYNYSVIEG

SEQ ID NO: 11721 - protein, 15 aa, Rubus idaeus
PQAVKSVEIIEGDGG

SEQ ID NO: 11722 - protein, 15 aa, Betula verrucosa
IEGGPIGDTLEKISN

SEQ ID NO: 11723 - protein, 15 aa, Corylus avellana
VKERVDEVDNTNFTY

SEQ ID NO: 11724 - protein, 15 aa, Fragaria ananassa
YSYSLIEGDALSENI

SEQ ID NO: 11725 - protein, 15 aa, Betula verrucosa
PDGGSILKISNKYHT

SEQ ID NO: 11726 - protein, 15 aa, Prunus avium
TEFTSVIPPEKLFKA

SEQ ID NO: 11727 - protein, 15 aa, Fagus sylvatica
TTVITPARLFKAFVL

SEQ ID NO: 11728 - protein, 15 aa, Betula platyphylla
ITFPEGSHFKYMKHR

SEQ ID NO: 11729 - protein, 15 aa, Ostrya carpinifolia
PQAISKVENVGGNGG

SEQ ID NO: 11730 - protein, 15 aa, Betula verrucosa
TLEKISNEIKIVATP

SEQ ID NO: 11731 - protein, 15 aa, Actinidia deliciosa
YSYSIIEGGALDVFE

SEQ ID NO: 11732 - protein, 15 aa, Betula verrucosa
FKYVKDRVDEVDHTN

SEQ ID NO: 11733 - protein, 15 aa, Ostrya carpinifolia
ERVDEVDNANFKYNY

SEQ ID NO: 11734 - protein, 15 aa, Carpinus betulus
ERVDEVDNANFKYNY

SEQ ID NO: 11735 - protein, 15 aa, Betula platyphylla
VFNYEDEATSVIAPA

SEQ ID NO: 11736 - protein, 15 aa, Betula verrucosa
YSVIEGGPIGDTLEK

SEQ ID NO: 11737 - protein, 15 aa, Betula platyphylla
PENVSSAENIEGNGG

SEQ ID NO: 11738 - protein, 15 aa, Fragaria ananassa
TYSYSLIEGDALSEN

SEQ ID NO: 11739 - protein, 15 aa, Vigna radiata
SDALFKAVEAYLLAN

SEQ ID NO: 11740 - protein, 15 aa, Ostrya carpinifolia
VDNANFKYNYTVIEG

SEQ ID NO: 11741 - protein, 15 aa, Carpinus betulus
VDNANFKYNYTVIEG

SEQ ID NO: 11742 - protein, 15 aa, Alnus glutinosa
PEAVSSVENIEGNGG

SEQ ID NO: 11743 - protein, 123 aa, Prunus dulcis
MASSGQLLKLVCLVAVMCCMAVGGPKAMAAVSCGQVVNNLTPCINYVANGGALNPSCCTGVRSLYSLAQTTADRQSICNCLKQAVNGIPYTNANAGLAAGLPGKCGVNIPYKISPSTDCKTIK

SEQ ID NO: 11744 - protein, 131 aa, Prunus dulcis
MSWQQYVDDHLMCDIDGNRLTAAAILGQDGSVWSQSATFPAFKPEEIAAILKDFDQPGTLAPTGLFLGGTKYMVIQGEAGAVIRGKKGSGGITVKKTNQALIIGIYDEPLTPGQCNMIVERLGDYLIEQGL

SEQ ID NO: 11745 - protein, 113 aa, Prunus dulcis
MKVVAAYLLAVLGGNTTPSAEDLKDILGSVGAETDDDRIQLLLSEVKGKDITELIASGREKLASVPSGGGAVAVAAPGAGAGAAAPAAAEPKKEEKVEEKEDTDDDMGFSLFD

SEQ ID NO: 11746 - protein, 551 aa, Prunus dulcis
MAKAFVFSLCLLLVFNGCLAARQSQLSPQNQCQLNQLQAREPDNRIQAEAGQIETWNFNQEDFQCAGVAASRITIQRNGLHLPSYSNAPQLIYIVQGRGVLGAVFSGCPETFEESQQSSQQGRQQEQEQERQQQQQGEQGRQQGQQEQQQERQGRQQGRQQQEEGRQQEQQQGQQGRPQQQQQFRQFDRHQKTRRIREGDVVAIPAGVAYWSYNDGDQELVAVNLFHVSSDHNQLDQNPRKFYLAGNPENEFNQQGQSQPRQQGEQGRPGQHQQPFGRPRQQEQQGSGNNVFSGFNTQLLAQALNVNEETARNLQGQNDNRNQIIRVRGNLDFVQPPRGRQEREHEERQQEQLQQERQQQGGQLMANGLEETFCSLRLKENIGNPERADIFSPRAGRISTLNSHNLPILRFLRLSAERGFFYRNGIYSPHWNVNAHSVVYVIRGNARVQVVNENGDAILDQEVQQGQLFIVPQNHGVIQQAGNQGFEYFAFKTEENAFINTLAGRTSFLRALPDEVLANAYQISREQARQLKYNRQETIALSSSQQRRAVV

SEQ ID NO: 11747 - protein, 264 aa, Prunus dulcis
MATMTKAELPLLVLFLSTLLLATSVPSVRAQVTCEEGCYSISDQSKVGECLQMCSSHGQSCEDRCMREARWPQQQEQCLRMCRQQEQGHHLPCREQCIRSPDREMCERACQQQQGQGGGRQCLQRCKMITRDPRERLKCVRTCTQGQQQGVFQGQQQQQQVEQQCRQHCQSERDPMRQQECQEYCVGQMMQQEYEQQCRSRCQWERPRREQQEQCQEECTEKIRQLEQCQEGCKIQGQYGPQQQECQRMCREQFEQGQGIRMVA

SEQ ID NO: 11748 - protein, 563 aa, Prunus dulcis
MEKSTMSAILLVLYIFVLHLQYSEVHSLATTSDHDFSYLSFAYDATDLELEGSYDYVIVGGGTSGCPLAATLSEKYKVLVLERGSLPTAYPNVLTADGFVYNLQQEDDGKTPVERFVSEDGIDNVRGRVLGGTSIINAGVYARANTSIYSASGVDWDMDLVNQTYEWVEDTIVYKPNSQSWQSVTKTAFLEAGVHPNHGFSLDHEEGTRITGSTFDNKGTRHAADELLNKGNSNNLRVGVHASVEKIIFSNAPGLTATGVIYRDSNGTPHQAFVRSKGEVIVSAGTIGTPQLLLLSGVGPESYLSSLNIPVVLSHPYVGQFLHDNPRNFINILPPNPIEPTIVTVLGISNDFYQCSFSSLPFTTPPFGFFPSASYPLPNSTFAHFASKVAGPLSYGSLTLKSSSNVRVSPNVKFNYYSNLTDLSHCVSGMKKIGELLSTDALKPYKVEDLPGVEGFNILGIPLPKDQTDDAAFETFCRESVASYWHYHGGCLVGKVLDGDFRVTGINALRVVDGSTFPYTPASHPQGFYLMLGRYVGIKILQERSASDLKILDSLKSAASLVL

SEQ ID NO: 11749 - protein, 538 aa, Anacardium occidentale
MGPPTKFSFSLFLVSVLVLCLGFALAKIDPELKQCKHQCKVQRQYDEQQKEQCVKECEKYYKEKKGREREHEEEEEEWGTGGVDEPSTHEPAEKHLSQCMRQCERQEGGQQKQLCRFRCQERYKKERGQHNYKREDDEDEDEDEAEEEDENPYVFEDEDFTTKVKTEQGKVVLLPKFTQKSKLLHALEKYRLAVLVANPQAFVVPSHMDADSIFFVSWGRGTITKILENKRESINVRQGDIVSISSGTPFYIANNDENEKLYLVQFLRPVNLPGHFEVFHGPGGENPESFYRAFSWEILEAALKTSKDTLEKLFEKQDQGTIMKASKEQIRAMSRRGEGPKIWPFTEESTGSFKLFKKDPSQSNKYGQLFEAERIDYPPLEKLDMVVSYANITKGGMSVPFYNSRATKIAIVVSGEGCVEIACPHLSSSKSSHPSYKKLRARIRKDTVFIVPAGHPFATVASGNENLEIVCFEVNAEGNIRYTLAGKKNIIKVMEKEAKELAFKMEGEEVDKVFGKQDEEFFFQGPEWRKEKEGRADE

SEQ ID NO: 11750 - protein, 457 aa, Anacardium occidentale
LSVCFLILFHGCLASRQEWQQQDECQIDRLDALEPDNRVEYEAGTVEAWDPNHEQFRCAGVALVRHTIQPNGLLLPQYSNAPQLIYVVQGEGMTGISYPGCPETYQAPQQGRQQGQSGRFQDRHQKIRRFRRGDIIAIPAGVAHWCYNEGNSPVVTVTLLDVSNSQNQLDRTPRKFHLAGNPKDVFQQQQQHQSRGRNLFSGFDTELLAEAFQVDERLIKQLKSEDNRGGIVKVKDDELRVIRPSRSQSERGSESEEESEDEKRRWGQRDNGIEETICTMRLKENINDPARADIYTPEVGRLTTLNSLNLPILKWLQLSVEKGVLYKNALVLPHWNLNSHSIIYGCKGKGQVQVVDNFGNRVFDGEVREGQMLVVPQNFAVVKRAREERFEWISFKTNDRAMTSPLAGRTSVLGGMPEEVLANAFQISREDARKIKFNNQQTTLTSGESSHHMRDDA

SEQ ID NO: 11751 - protein, 138 aa, Anacardium occidentale
MAKFLLLLSAFAVLLLVANASIYRAIVEVEEDSGREQSCQRQFEEQQRFRNCQRYVKQEVQRGGRYNQRQESLRECCQELQEVDRRCRCQNLEQMVRQLQQQEQIKGEEVRELYETASELPRICSISPSQGCQFQSSY

SEQ ID NO: 11752 - protein, 149 aa, Pistacia vera
MAKLVLLLSAFAFLILAANASIYRATVEVEGENLSSGQSCQKQFEEQQKFKHCQMYVQQEVQKSQDGHSLTARINQRQQCFKQCCQELQEVDKKCRCQNLEQMVKRQQQQGQFRGEKLQELYETASELPRMCNISPSQGCQFSSPYWSY

SEQ ID NO: 11753 - protein, 496 aa, Pistacia vera
MGYSSLLSFSLGFLLLFHCSFAQIEQVVNSQQRQQQQRFQTQCQIQNLNALEPKRRIESEAGVTEFWDQNEEQLQCANVAVFRHTIQSRGLLVPSYDNAPELVYVVQGSGIHGAVFPGCPETFQEESQSRSRSERSQQSGEQHQKVRPIQEGDVIALPAGVAHWIYNNGQSKLVLVALADVGNSENQLDQYLRKFVLGGSPQQEIQGSGQSRSRSQSQSSRRGQQGQQSNNILSAFDEEILAQSFNIDTQLARRLQKEKRQRGIIVRVQEDLEVLSPHRQEQEQEYEEERERRQRNGLEETFCTMTLKYNINDPSRADVYNPRGGRVSSVNALNLPILRFLQLSAKKGVLHRDAILAPHWNVNAHSIVYITRGNGRIQIVSENGESVFDEEIREGQLVVVPQNFAVVKRASSDKFEWVSFKTNGLSQTSQLAGRVSVFRALPLDVIKNSFDISREDARRLKESRSETTIFAPGSSSQRKSQSERERQREREEREIH

SEQ ID NO: 11754 - protein, 519 aa, Pistacia vera
KTDPELKQCKHQCKVQRQYDEEQKEQCAKGCEKYYKEKKGREQEEEEEEEWGSGRGRGDEFSTHEPGEKRLSQCMKQCERQDGGQQKQLCRFRCQEKYKKERREHSYSRDEEEEEEGDEEQEEEDENPYVFEDEHFTTRVKTEQGKVVVLPKFTKRSKLLRGLEKYRLAFLVANPQAFVVPNHMDADSIFFVSWGRGTITKIRENKRESMNVKQGDIIRIRAGTPFYIVNTDENEKLYIVKLLQPVNLPGHYEVFHGPGGENPESFYRAFSREVLEAALKTPRDKLEKLFEKQDEGAIVKASKEQIRAMSRRGEGPSIWPFTGKSTGTFNLFKKDPSQSNNYGQLFESEFKDYPPLQELDIMVSYVNITKGGMSGPFYNSRATKIAIVVSGEGRLEIACPHLSSSKNSGQEKSGPSYKKLSSSIRTDSVFVVPAGHPFVTVASGNQNLEILCFEVNAEGNIRYTLAGKKNIIEVMEKEAKELAFKTKGEEVDKVFGKQDEEFFFQGPKWRQHQQGRADE

SEQ ID NO: 11755 - protein, 230 aa, Pistacia vera
MALLSYVTRKTLTESLRLGLKSHVRGLQTFTLPDLPYEYGALEPAISSEIMQLHHQKHHQTYITNYNKALEQLDQAINKGDASAVVKLQSAIKFNGGGHINHSIFWKNLTPVSEGGGEPPHGSLGWAIDTNFGSMEALIQRMNAEGAALQGSGWVWLGLDKESKKLVVETTANQDPLVTKGPSLVPLLGIDVWEHAYYLQYKNVRPDYLKNIWKVINWKYAGELYQKECP

SEQ ID NO: 11756 - protein, 473 aa, Pistacia vera
MANPSLLSLSVCLLILFHGCLASRQQGQQQNECQIDQLDALEPDNRVEYEAGMVETWDPNHEQFRCAGVAVARHTIQPNGLRLPEYSNAPTLMYIVEGEGMTGTLIPGCPETYQAPQQGQQHGQSSRFQDKHQKIQRFRKGDIIALPAGVANWCYNEGNSPVVTVTLLDVSNSQNQLDMYPRKFNLAGNPEDEFQQQQQQQSRGRRQSQQKSCNNIFCGFDTKILAEVFQVEQSLVKQLQNEKDNRGAIVKVKGDLQVIRPPRRQSERGFESEEESEYERGRRGRDNGLEETICTMKLKENIHDPSRSDIYTPEVGRITSLNSLNLPILKWLQLSAERGVLQNNALMVPHWNFNAHSIVYGCKGNAQVQVVDNFGNTVFDGEVSEGQIFVVPQNFAVVKRARGQRFEWISFKTNDRAMISPLAGSTSVLRAMPEEVLANAFQISREDARKIKFNNEQPTLSSGQSSQQMRDDA

SEQ ID NO: 11757 - protein, 143 aa, Carya illinoinensis
MARVAALLVALLFVANAAAFRTTITTMEIDEDIDNPRRRGESCREQIQRQQYLNRCQDYLRQQCRSGGYDEDNQRQHFRQCCQQLSQMEEQCQCEGLRQAVRQQQQEEGIRGEEMEEMVQCASDLPKECGISSRSCEIRRSWF

SEQ ID NO: 11758 - protein, 792 aa, Carya illinoinensis
MVTKAKIPLFLFLSALFLALVCSSLALETEDLSNELNPHHDPESHRWEFQQCQERCQHEERGQRQAQQCQRRCEEQLREREREREREEIVDPREPRKQYEQCRETCEKQDPRQQPQCERRCERQFQEQQERERRERRRGRDDDDKENPRDPREQYRQCEEHCRRQGQGQRQQQQCQSRCEERFEEEQRRQEERERRRGRDNDDEENPRDPREQYRQCQEHCRRQGQGQRQQQQCQSRCEERLEEEQRKQEERERRRGRDEDDQNPRDPEQRYEQCQQQCERQRRGQEQQLCRRRCEQQRQQEERERQRGRDRQDPQQQYHRCQRRCQTQEQSPERQRQCQQRCERQYKEQQGREWGPDQASPRRESRGREEEQQRHNPYYFHSQGLRSRHESGEGEVKYLERFTERTELLRGIENYRVVILEANPNTFVLPYHKDAESVIVVTRGRATLTFVSQERRESFNLEYGDVIRVPAGATEYVINQDSNERLEMVKLLQPVNNPGQFREYYAAGAQSTESYLRVFSNDILVAALNTPRDRLERFFDQQEQREGVIIRASQEKLRALSQHAMSAGQRPWGRRSSGGPISLKSQRSSYSNQFGQFFEACPEEHRQLQEMDVLVNYAEIKRGAMMVPHYNSKATVVVYVVEGTGRFEMACPHDVSSQSYEYKGRREQEEEESSTGQFQKVTARLARGDIFVIPAGHPIAITASQNENLRLVGFGINGKNNQRNFLAGQNNIINQLEREAKELSFNMPREEIEEIFERQVESYFVPMERQSRRGQGRDHPLASILDFAGFF

SEQ ID NO: 11759 - protein, 505 aa, Carya illinoinensis
MAKPILLSIYLCLIIVALFNGCLAQSGGRQQHKFGQCQLNRLDALEPTNRIEAEAGVIESWDPNHQQLQCAGVAVVRRTIEPNGLLLPHYSNAPQLVYIARGRGITGVLFPGCPETFEESQRQSQQGQRREFQQDRHQKIRHFREGDIIAFPAGVAHWCYNDGSSPVVAIFLLDTHNNANQLDQNPRNFYLAGNPDDEFRPQGQQEYEQHRRQQQHQQRRGEHGEQQRDLGNNVFSGFDAEFLADAFNVDTETARRLQSENDHRGSIVRVEGRQLQVIRPRWSREEQEHEERKERERERESESERRQSRRGGRDDNGLEETICTLSLRENIGDPSRADIYTEEAGRISTVNSHNLPILRWLQLSAERGALYSDALYVPHWNLNAHSVVYALRGRAEVQVVDNFGQTVFDDELREGQLLTIPQNFAVVKRARDEGFEWVSFKTNENAMVSPLAGRTSAIRALPEEVLVNAFQIPREDARRLKFNRQESTLVRSRSRSSRSERRAEV

SEQ ID NO: 11760 - protein, 161 aa, Juglans nigra
RHEARKCIFHTFSLTMARLATLAALLVALLFVANAAAFRTTITTMEIDEDIDNPRRRGEGCQEQIQRQQNLNHCQYYLRQQSRSGGYDEDNQRQHFRQCCQQLSQIEEQCQCEGLRQAVRRQQQQQGLRGEEMEEMVQSARDLPKECGISSQRCEIRRSWF

SEQ ID NO: 11761 - skipped

SEQ ID NO: 11762 - protein, 214 aa, Bos taurus
MKLLILTCLVAVALARPKHPIKHQGLPQEVLNENLLRFFVAPFPEVFGKEKVNELSKDIGSESTEDQAMEDIKQMEAESISSSEEIVPNSVEQKHIQKEDVPSERYLGYLEQLLRLKKYKVPQLEIVPNSAEERLHSMKEGIHAQQKEPMIGVNQELAYFYPELFRQFYQLDAYPSGAWYYVPLGTQYTDAPSFSDIPNPIGSENSEKTTMPLW

SEQ ID NO: 11763 - protein, 222 aa, Bos taurus
MKFFIFTCLLAVALAKNTMEHVSSSEESIISQETYKQEKNMAINPSKENLCSTFCKEVVRNANEEEYSIGSSSEESAEVATEEVKITVDDKHYQKALNEINQFYQKFPQYLQYLYQGPIVLNPWDQVKRNAVPITPTLNREQLSTSEENSKKTVDMESTEVFTKKTKLTEEEKNRLNFLKKISQRYQKFALPQYLKTVYQHQKAMKPWIQPKTKVIPYVRYL

SEQ ID NO: 11764 - protein, 259 aa, Bos taurus
MPLNTIYKQPQNQIIIHSAPPSLLVLYFGKKELRAMKVLILACLVALALARELEELNVPGEIVESLSSSEESITRINKKIEKFQSEEQQQTEDELQDKIHPFAQTQSLVYPFPGPIPNSLPQNIPPLTQTPVVVPPFLQPEVMGVSKVKEAMAPKHKEMPFPKYPVEPFTESQSLTLTDVENLHLPLPLLQSWMHQPHQPLPPTVMFPPQSVLSLSQSKVLPVPQKAVPYPQRDMPIQAFLLYQEPVLGPVRGPFPIIV

SEQ ID NO: 11765 - protein, 190 aa, Bos taurus
MMKSFFLVVTILALTLPFLGAQEQNQEQPIRCEKDERFFSDKIAKYIPIQYVLSRYPSYGLNYYQQKPVALINNQFLPYPYYAKPAAVRSPAQILQWQVLSNTVPAKSCQAQPTTMARHPHPHLSFMAIPPKKNQDKTEIPTINTIASGEPTSTPTTEAVESTVATLEDSPEVIESPPEINTVQVTSTAV

SEQ ID NO: 11766 - protein, 285 aa, Aedes aegypti
MDAIKKKMQAMKLEKDNALDRALLCEQQARDANLRAEKAEEEARQLQKKIQAIENDLDQTQEALMAVNAKLEEKEKALQNAESEVAALNRRIQLLEEDLERSEERLASATAKLSEASAAADESERARKVLENRALADEERMDALENQLKEARFMAEEADKKYDEVARKLAMVEADLERAEERAEAGEGKIVELEEELRVVGNNLKSLEVSEEKANQREEEYKNQIKTLTTRLKEAEARAEFAERSVQKLQKEVDRLEDELVMEKEKYREIGDDLDTAFVELILKE

SEQ ID NO: 11767 - protein, 284 aa, Anisakis simplex
MDAIKKKMQAMKIEKDNALDRADAAEEKVRQMTDKLERIEEELRDTQKKMMQTENDLDKAQEDLSTANSNLEEKEKKVQEAEAEVAALNRRMTLLEEELERAEERLKLATAKLEEATHTADESERVRKVMENRSFQDEERANTVESQLKEAQMLAEEADRKYDEVARKLTMVEADLERAEERAETGENKIVELEEELRVVGNNLKSLEVSEEKALQREDSYEEQIRTVSARLKEAETRAEFAERSVQKLQKEVDRLEDELVHEKERYKSISEELDQTFQELSGY

SEQ ID NO: 11768 - protein, 287 aa, Ascaris lumbricoides
MDAIKKKMQAMKIEKDNALDRADAAEEKVRQMTDKLERIEEELRDTQKKMMQTENDLDKAQEDLSVANSNLEEKEKKVQEAEAEVAALNRRMTLLEEELERAEERLKLATEKLEEATHTADESERVRKVMENRSFQDEERANTVESQLKEAQMLAEEADRKYDEVARKLAMVEADLERAEERAEAGENKIVELEEELRVVGNNLKSLEVSEEKALQREDSYEEQIRTVSARLKEAETRAEFAERSVQKLQKEVDRLEDELVHEKERYKSISEELDQTFQELSGYRSD

SEQ ID NO: 11769 - protein, 284 aa, Balanus rostratus
MDAIKKKMQAMKLEKENALDKAEQLEQKLRDVEETKAKAEEDLTLLQKKYTNLENEFDQVNEQYNEGVTKLEVSEKRVTEAEDEIKGYTRRIQLLEDDLERTPVKLDEATFKLEDATKTADESERGRKVLESRSIADDDRIDALEKQVKDAKYVAEEADRKYDEAARKLAITEVDLERSETRLEAAEAKITELSEELAVVGNNCKALQNAVDQASQREDSYEETIRDLTQRLKDAENRAAEAERVVNKLQKEVDRLEDELLAEKEKYKAISDELDQTFAELAGM

SEQ ID NO: 11770 - protein, 284 aa, Blattella germanica
MDAIKKKMQAMKLEKDNAMDRALLCEQQARDANIRAEKAEEEARSLQKKIQQIENDLDQTMEQLMQVNAKLDEKDKALQNAESEVAALNRRIQLLEEDLERSEERLATATAKLAEASQAADESERARKILESKGLADEERMDALENQLKEARFMAEEADKKYDEVARKLAMVEADLERAEERAETGESKIVELEEELRVVGNNLKSLEVSEEKANLREEEYKQQIKTLNTRLKEAEARAEFAERSVQKLQKEVDRLEDELVHEKEKYKYICDDLDMTFTELIGN

SEQ ID NO: 11771 - protein, 284 aa, Blomia tropicalis
MEAIKKKMQAMKLEKDNAIDRAEIAEQKSRDANLRAEKSEEEVRALQKKIQQIENELDQVQESLTQANTKLEEKEKSLQTAEGDVAALNRRIQLIEEDLERSEERLKVATAKLEEASHSADESERMRKMLEHRSITDEERMDGLESQLKEARMMAEDADRKYDEVARKLAMVEADLERAEERAETGETKIVELEEELRVVGNNLKSLEVSEEKAQQREEAYEQQIRMMTGKLKEAEARAEFAERSVRKLQKEVDRLEDELVHEKEKYKSISDELDQTFAELTGY

SEQ ID NO: 11772 - protein, 264 aa, Charybdis feriatus
MDAIKKKMQAMKLEKDNAMDRADTLEQQNKEANLRAEKTEEEIRATQKKMQQVENELDQAQEQLSAANTKLDEKEKALQNAEGEVAALNRRIQLPEEDLERSEERLNTATTKLAEASQAADESERMRKVLENRSLSDEERMDALENQLKEARFLAEEADRKYDEVARKLAMVEADLERAEERAESGESKIVELEEELRVVGNNLKSLEVSEEKANQREETYKEQIKTLANKLKAAEARAEFAERSVQKLQKEVDRLEDELVNEK

SEQ ID NO: 11773 - protein, 285 aa, Chironomus kiiensis
MDAIKKKMQAMKLEKDNALDRALLCENQARDANLRAEKAEEEARTLQKKIQTIENDLDQTQGQETLVNGKLEGKEKALQNAESEVAALNRRIQLLGEDLDRSEERLASATAKLSEASAAADESERARKILENRSLADEERMDALENQLKEARFLAEEADKKYDEVARKLAMVEADLERAEERAEAGEAKIVELEEELRVVGNNLKSLEVSEEKANQREEEYKNQIKTLTTRLKEAEARAEFAERSVQKLQKEVDRLEDELVSEKEKYREIGDDLDTAFVELILKE

SEQ ID NO: 11774 - protein, 284 aa, Chionoecetes opilio
MDAIKKKMQAMKLEKDNAMDKADTLEQQNKEANLRAEKTEEEIRANQKKSQLVENELDHAQEQLSAATHKLVEKEKAFANAEGEVAALNRRIQLLEEDLERSEERLNTATTKLAEASQAADESERMRKVLENRSLSDEERMDALENQLKEARFLAEEADRKYDEVARKLAMVEADLERAEERAESGESKIVELEEELRVVGNNLKSLEVSEEKANQREETYKEQIKTLANKLKAAEARAEFAERSVQKLQKEVDRLEDELVNEKEKYKNIADEMDQAFSELSGF

SEQ ID NO: 11775 - protein, 284 aa, Chortoglyphus arcuatus
MEAIKKKMQAMKLEKDNAIDRAEIAEQKSRDANLKAEKSEEEVRGLQKKIQQIENELDQVQESFTQANTKLEEKEKALQTAEGDVAALNRRIQLIEEDLERSEERLKVATAKLEEASHAADESERMRKMLEHRSITDEERMDGLENQLKEARMMAEDADRKYDEVARKLAMVEADLERAEERAETGESKIVELEEELRVVGNNLKSLEVSEEKAQQREEAYEQQIRIMTAKLKEAEARAEFAERSVQKLQKEVDRLEDELVHEKEKYKSISDELDQTFAELTGY

SEQ ID NO: 11776 - protein, 284 aa, Crangon crangon
MDAIKKKMQAMKLEKDNAMDRADTLEQQNKEANNRAEKSEEEVFSLQKRMQQLENDLDSVQEALLKANAHLEEKDKALSNAEGEVAALNRRIQLLEEDLERSEERLNTATTKLAEASQAADESERMRKVLENRSLSDEERMDALENQLKEARFLAEEADRKYDEVARKLAMVEADLERAEERAETGESKIVELEEELRVVGNNLKSLEVSEEKANQREEAYKEQIKTLTNKLKAAEARAEFAERSVQKLQKEVDRLEDELVNEKEKYKSITDELDQTFSELSGY

SEQ ID NO: 11777 - protein, 160 aa, Crassostrea virginica
RNRKVLENLNNASEERTDVLEKQLTEAKLIAEEADKKYDEAARKLAITEVDLERAEARLEAAEAKVLELEEELKVVGNNMKSLEISEQEASQREDSYEETIRDLTQRLKDAENRATEAERTVSKLQKEVDRLEDELLAEKERYKAISDELDQTFAELAGY

SEQ ID NO: 11778 - protein, 284 aa, Crassostrea gigas
MDSIKKKMIAMKMEKENAQDRAEQLEQQLRDTEEQKAKIEEDLTSLQKKHSNLENEFDTVNEKYQECQTKLEEAEKTASEAEQEIQSLNRRIQLLEEDMERSEERLQTATEKLEEASKAADESERNRKVLENLNNASEERTDVLEKQLTEAKLIAEEADKKYDEAARKLAITEVDLERAEARLEAAEAKVYELEEQLSVVANNIKTLQVQNDQASQREDSYEETIRDLTQRLKDAENRATEAERTVSKLQKEVDRLEDELLAEKERYKAISDELDQTFAELAGY

SEQ ID NO: 11779 - protein, 299 aa, Dermatophagoides farinae
FFFVAAKQQQQPSTKMEAIKKKMQAMKLEKDNAIDRAEIAEQKARDANLRAEKSEEEVRALQKKIQQIENELDQVQEQLSAANTKLEEKEKALQTAEGDVAALNRRIQLIEEDLERSEERLKIATAKLEEASQSADESERMRKMLEHRSITDEERMDGLENQLKEARMMAEDADRKYDEVARKLAMVEADLERAEERAETGESKIVELEEELRVVGNNLKSLEVSEEKAQQREEAYEQQIRIMTAKLKEAEARAEFAERSVQKLQKEVDRLEDELVHEKEKYKSISDELDQTFAELTGY

SEQ ID NO: 11780 - protein, 284 aa, Dermatophagoides pteronyssinus
MEAIKNKMQAMKLEKDNAIDRAEIAEQKARDANLRAEKSEEEVRALQKKIQQIENELDQVQEQLSAANTKLEEKEKALQTAEGDVAALNRRIQLIEEDLERSEERLKIATAKLEEASQSADESERMRKMLEHRSITDEERMEGLENQLKEARMMAEDADRKYDEVARKLAMVEADLERAEERAETGESKIVELEEELRVVGNNLKSLEVSEEKAQQREEAHEQQIRIMTTKLKEAEARAEFAERSVQKLQKEVGRLEDELVHEKEKYKSISDELDQTFAELTGY

SEQ ID NO: 11781 - protein, 284 aa, Eriocheir sinensis
MDAIKKKMQAMKLEKDNAMDRADTLEQQNKEANNRAEKTEEEIRATQKKMQQVENELDQAQEQLSAANTKLDEKEKALQNAEGEVAALNRRIQLLEEDLERSEERLNTATTKLAEASQAADESERMRKVLENRSLSDEERMDALENQLKEARFLAEEADRKYDEVARKLAMVEADLERAEERAESGESKIVELEEELRVVGNNLKSLEVSEEKANQREETYKEQIKTLANKLKAAEARAEFAERSVQKLQKEVDRLEDELVNEKEKYKSITDELDQTFSELSGY

SEQ ID NO: 11782 - protein, 284 aa, Erimacrus isenbeckii
MDAIKKKMQAMKLEKDNAMDRAHTLEQQNKEANLRAEKTEEEIRATQKKMQQIENELDHAQEQLSAANTKLDEKEKALQNAEGEVAALNRRIQLLEEDLERSEERLNTATTKLAEASQAADESERMRKVLENRSLSDEERMDALENQLKEARFLAEEADRKYDEVARKLAMVEADLERAEERAESGESKIVELEEELRVVGNNLKSLEVSEEKANQREETYKEQIKTLANKLKAAEARAEFAERSVQKLQKEVDRLEDELVNEKEKYKSITDELDQTFSELSGY

SEQ ID NO: 11783 - protein, 284 aa, Euphausia pacifica
MDAIKKKMQAMKMEKDSAMDRADALEAQNKETNARAEKADDEVHNLQKRLQTLENDLDQVSEALLKANTQLVEKDKALQNAEGEVAALNRRIQLLEEDLERSEERLNTATTKLAEASQAADESERMRKVLENRSLLDEERMDALENQLKEARLLAEEADRKYDEVARKLAMVEADLERAEERAEAGENKIVELEEELRVVGNNLKSLEVSEEKANQREEAYKEQIKHLTHKLKTAEARAEFAERSVQKLQKEVDRLEDELVNEKEKYKGITDELDQTFNELSGY

SEQ ID NO: 11784 - protein, 284 aa, Euphausia superba
MDAIKKKMQAMKMEKDSAMDRSDALEAQNKETNAKADKADDEVHNLQKRLQTLENDLDQVSEALLKANTQLVEKDKALQNAEGEVAALNRRIQLLEEDLERSEERLNTATTKLAEASQAADESERMRKVLENRSMLDEERMDALESQLKEARLLAEEADRKYDEVARKLAMVEADLERAEERAEAGENKIVELEEELRVVGNNLKSLEVSEEKANQREEAYKEQIKHLTHKLKTAEARAEFAERSVQKLQKEVDRLEDELVNEKEKYKGITDELDQTFNELSGY

SEQ ID NO: 11785 - protein, 284 aa, Fulvia mutica
MEAIKKKMQSMKNEKENAIDKAEQLEIKLKDTEDSKAKIEEDLTSLQKKYTNLENEFDQVNEKHADSVAKLEAAEKRLTETEDEIKGYTRKIQLLEDDLERTQTKLDEATGKLEEATKSADESERGRKVLESRSLADDDRIDGLEKQVKDAKYVAEESDRKYDEAARKLAITEVDLERAETRLEAAEAKIVELTEELSVVGNNLKGLQNAVDQASQREDSYEETIRDLTQRLKDAENRASEAERVVIKLQKEVDRLEDELLQEKEKYKQISDELDQTFAELAGM

SEQ ID NO: 11786 - protein, 284 aa, Haliotis discus
MDAIKKKMLAMKMEKENAVDRAEQNEQKLRDTEEQKAKIEEDLNNLQKKCANLENDFDNVNEQLQEAMAKLETSEKRVTEMEQEVSGTTRKITLLEEDLERNEERLQTATERLEEASKAADESERGARVLESRSLADDERIDQLEAQLKEAKYIAEDAERKYDEAARKLAITEVDLERAEARLEAAEAKILELEEELKVVGNNMKSLEISEQEASQREDSYEETIRDLTQRLKDAENRATEAERTVSKLQKEVDRLEDELLAEKEKYKAISDELDQTFAELAGY

SEQ ID NO: 11787 - protein, 284 aa, Haliotis diversicolor
MDAIKKKMLAMKMEKENAVDRAEQNEQKLRDTEEQKAKIEEDLNNLQKKCANLENDFDNVNEQLQEAMAKLETSEKRVTEMEQEVSGTTRKITLLEEDLERNEERLQTATERLEEASKAADESERGRKVLESRSLADDERIDQLEAQLKEAKYIAEDAERKYDEAARKLAITEVDLERAEARLEAAEAKILELEEELKVVGNNMKSLEISEQEASQREDSYEETIRDLTQRLKDAENRATEAERTVSKLQKEVDRLEDELLAEKEKYKAISDELDQTFAELAGY

SEQ ID NO: 11788 - protein, 284 aa, Haliotis sp.
MDAIKKKMLAMKMEKENAVDRAEQNEQKLRDTEEQKAKIEEDLNNLQKKCANLENDFDNVNEQLQEAMTKLETSEKRVTEMEQEVSGTTRKITLLEEDLERNEERLQTATERLEEASKAADESERGRKVLESRSLADDERIDQLEAQLKEAKYIAEDAERKYDEAARKLAITEVDLERAEARLEAAEAKILELEEELKVVGNNMKSLEISEQEASQREDSYEETIRDLTQRLKDAENRATEAERTVSKLQKEVDRLEDELLAEKEKYKAISDELDQTFAELAGY

SEQ ID NO: 11789 - protein, 284 aa, Helix aspersa
MDAIKKKMLAMKMEKENALDRAEQVEQKLRDCECNKNKVEEDLNNLQKKFAILENDFDSINEQLLDANTKLEASEKKNAEIESETAGLQRRIQLLEEDLERSEERLQSATEKLEEASKAADESERGRKVLESRSLADDERLDGLEAQLKEAKYIAEDAERKFDEAARKLAITEVDLERAEARLEAAEAKILELEEELKVVGNNMKSLEISEQEASQREDSYEETIRDLTQRLKDAENRASEAERTVSKLQKEVDRLEDELLAEKERYKATSDELDSTFAELAGY

SEQ ID NO: 11790 - protein, 284 aa, Homarus americanus
MDAIKKKMQAMKLEKDNAMDRADTLEQQNKEANIRAEKSEEEVHNLQKRMQQLENDLDQVQESLLKANTQLEEKDKALSNAEGEVAALNRRIQLLEEDLERSEERLNTATTKLAEASQAADESERMRKVLENRSLSDEERMDALENQLKEARFLAEEADRKYDEVARKLAMVEADLERAEERAETGESKIVELEEELRVVGNNLKSLEVSEEKANQREEAYKEQIKTLANKLKAAEARAEFAERSVQKLQKEVDRLEDELVNEKEKYKSITDELDQTFSELSGY

SEQ ID NO: 11791 - protein, 284 aa, Lepidoglyphus destructor
MEAIKNKMQAMKLEKDNAIDRAEIAEQKSRDANLRAEKSEEEVRGLQKKIQQIENELDQVQESLTQANTKLEEKEKSLQTAEGDVAALNRRIQLIEEDLERSEGRLKIATSKLEEASQSADESERMRKMLEHRSITDEERMEGLESQLKEARMMAEDADRKYDEVARKLAMVEADLERAEERAETGESKIVELEEELRVVGNNLKSLEVSEEKAQQREEAYEQQIRIMTTKLKEAEARAEFAERSVQKLQKEVDRLEDELVHEKEKYKSISDELDQTFAELTGY

SEQ ID NO: 11792 - protein, 284 aa, Lepisma saccharina
MEAIKKKMQAMKLEKDNAMDKADALEAQARDANRKADKILEEVQDLKKKPSQVETDFTTTKENLATANKNLEDKEKTLTNTESEVASLNRKVQMIEENLERSEERLGTALTKLGEASHAADEASRMCKVLENRSQQDEERMDQLTNQLKEARMLAEDADGKSDEVSRKMAQVEDDLEVAEDRVKSGDSKIMELEEELKVVGNSLKSLEVSEEKANQRVEEYKRQIKTLTVKLKEAEARAEYAEKYVKKLQKEVDRLEDELGINKDRYRALADEMDQTFAELSGY

SEQ ID NO: 11793 - protein, 283 aa, Litopenaeus vannamei
MDAIKKKMQAMKLEKDNAMDRADTLEQQNKEANNRAEKSEEEVHNLQKRMQQLENDLDQVQESLLKANIQLVEKDKALSNAEGEVAALNRRIQLLEEDLERSEERLNTATTKLAEASQAADESERMRKVLENRSLSDEERMDALENQLKEARFLAEEADRKYDEVARKLAMVEADLERAEERAETGESKIVELEEELRVVGNNLKSLEVSEEKANQREEAYKEQIKTLTNKLKAAEARAEFAERSVQKLQKEVDRLEDELVNEKEKYKSITDELDQTFELSGY

SEQ ID NO: 11794 - protein, 284 aa, Macrobrachium rosenbergii
MDAIKKKMQAMKLEKDNAMDRADTLEQQNKEANNRAEKSEEEVHNLQKRMQQLENDLDSVQEALLKANQHLEEKDKALSNAEGEVAALNRRIQLLEEDLERSEERLNTATTKLAEASQAADESERMRKVLENRSLSDEERMDALENQLKEARFLAEEADRKYDEVARKLAMVEADLERAEERAETGESKIVELEEELRVVGNNLKSLEVSEEKANQREEAYKEQIKTLTNKLKAAEARAEFAERSVQKLQKEVDRLEDELVNEKEKYKSITDELDQTFSELSGY

SEQ ID NO: 11795 - protein, 284 aa, Melicertus latisulcatus
MDAIKKKMQAMKLEKDNAMDRADTLEQQNKEANIRAEKAEDDVNKLQKKLQQLENDFDQVQEALLLANTNAVEKDKALSNAEGEVAALNRRIQLLEEDLERSEERLNTATTKLAEASQAADESERMRKVLENRSLSDEERMDALENQLKEARFLAEEADRKYDEVARKLAMVEADLERAEERAETGESKIVELEEELRVVGNNLKSLEVSEEKANQREEAYKEQIKTLTNKLKAAEARAEFAERSVQKLQKEVDRLEDELVNEKEKYKSITDELDQTFSELSGY

SEQ ID NO: 11796 - protein, 274 aa, Metapenaeus ensis
MKLEKDNAMDRADTLEQQNKEANNRAEKSEEEVHNLQKRMQQLENDLDQVQESLLKANNQLVEKDKALSNAEGEVAALNRRIQLLEEDLERSEERLNTATTKLAEASQAADESERMRKVLENRSLSDEERMDALENQLKEARFLAEEADRKYDEVARKLAMVEADLERAEERAETGESKIVELEEELRVVGNNLKSLEVSEEKANQREEAYKEQIKTLTNKLKAAEARAEFAERSVQKLQKEVDRLEDELVNEKEKYKSITDELDQTFSELSGY

SEQ ID NO: 11797 - protein, 284 aa, Mimachlamys nobilis
MDAIKKKMQAMKVDRENAQDLAEQMEQKLKDTETAKAKLEEEFNELQKKLTATENNYDTVNEQLQEANTKLENSEKQITQLESDVGGLQRRLTLLEEDYERSEEKLNSTTEKLEEASKAADESERNRKVLEGRSNSYEERIDELEKQLETAKNVATDADHKFDEAARKLAITEVDLERAETRLEAADAKVLELEEELTVVGANIKTLQVQNDQASQREDSYEETIRDLTKSLKDAENRATEAERQVVKLQKEVDRLEDELLAEKERYKAISDDLDQTFAEIAGY

SEQ ID NO: 11798 - protein, 284 aa, Neptunea polycostata
MDLIKKKMLSMKMDKENALDRADVMEQKFRDAEDQKSKLEDDLNLLQKKYSQLENEFDRVNEGLLDANAKLETQDKRVNEMEQEISGLNRRIQLLEEDLERSEERLQTATEKLEEATKAADESERARKVLESKNQTAEESADSLEAQLKESKYIAEDAERKYDEAARKLAITEIDLERAETRLEAAEAKCYELDEQLHVVGNNIKTLSIQNDQASQREDSYEETIRDLTQRLKDAENRAQEAERTVTKLQKEVDRLEDELLAEKERYKNISDELDQTFAELAGY

SEQ ID NO: 11799 - protein, 284 aa, Octopus vulgaris
MDAIKKKMLAMKMERELATDKAEQTDQKLRDTEDNKNKLEEDLTTLQKKFSNLENDFDNAKEQLAEANQKLETSEKRVGECESEIAGLNRRIQLLEEDLERSEERLSTAQTKLDEASKAADESERGRKVLENRSQGDEERIDLLEKQLEEAKWIAEDADRKFDEAARKLAITEVDLERAEARLEAAEAKIVELEEELKVVGNNMKSLEISEQEASQREDSYEETIRDLTHRLKEAENRAAEAERTVSKLQKEVDRLEDELLAEKERYKAISDELDQTFAELAGY

SEQ ID NO: 11800 - protein, 284 aa, Ommastrephes bartramii
MDAIKKKMLAMKMEKEVATDKAEQTEQSLRDLEDAKNKTEEDLSTLQKKYANLENDFDNANEQLTAANTNLEASEKRVAECESEIQGLNRRIQLLEEDLERSEERFSSAQSKLEDASKAADESERGRKVLENRSQGDEERIDLLEKQLEEAKWIAEDADRKFDEAARKLAITEVDLERAEARLEAAEAKIVELEEELKVVGNNMKSLEISEQEASQREDSYEETIRDLTHRLKEAENRAAEAERTVSKLQKEVDRLEDELLAEKERYKTISDELDQTFAELAGY

SEQ ID NO: 11801 - protein, 284 aa, Onchocerca volvulus
MDAIKKKMQAMKIEKDNALDRADAAEEKVRQMTEKLERIEEELRDTQKKMMQTENDLVKAQEDLSVANTNLEDKEKKVQEAEAEVAALNRRMTLLEEELERAEERLKIATDKLEEATHTADESERVRKVMENRSFQDEERANTVESQEKEAQLLAEEADRKYDEVARKLAMVEADLERAEERAEAGENEIVELEEELRVVGNNLKSLEVSEEKALQREDSYQEQIRTVSVRLKEAETRAEFAERSVQKLQKKVDRLEDELVHEKERYKNISEELDQTFQELSGY

SEQ ID NO: 11802 - protein, 284 aa, Oratosquilla oratoria
MDAIKKKMQAMKLEKDNAMDRADTLEQQNKEANNRAEKAEEEVHNLQKRMQQLENDLDQVQEQLLKANTQLEEKDKALQNAEGEVAALNRRIQLLEEDLERSEERLNTATTKLAEASQAADESERMRKVLENRSLSDEERMDALENQLKEARFLAEEADRKYDEVARKLAMVEADLERAEERAETGESKIVELEEELRVVGNNLKSLEVSEEKANQREEAYKEQIKQLTNKLKAAEARAEFAERSVQKLQKEVDRLEDELVNEKEKYKSITDELDQTFSELSGY

SEQ ID NO: 11803 - protein, 284 aa, Oreochromis mossambicus
MDAIKKKMQMLKLDKENALDRAEQAESDKKAAEDRSKQLEDDLVALQKKLKGTEDELDKYSEALKDAQEKLELAEKIATDAEGEVASLNRRIQLVEEELDRAQERLATALTKLEEAEKAADESERGMKVIENRAMKDEEKMELQEIQLKEAKHIAEEADRKYEEVARKLVIIEGDLERTEERAELSEGKCSELEEELKTVTNNLKSLEAQAEKYSQKEDKYEEEIKALTDKLKEAETRAEFAERSVAKLEKTIDDLEDELYAQKLKYKAISEELDHALNDMTSI

SEQ ID NO: 11804 - protein, 284 aa, Pandalus borealis
MDAIKKKMQAMKLEKDNAMDRADTLEQQNKEANNRAEKSEEEVFGLQKKLQQLENDLDSVQEALLKANQHLEEKDKALSNAEGEVAALNRRIQLLEEDLERSEERLNTATTKLAEASQAADESERMRKVLENRSLSDEERMDALENQLKEARFLAEEADRKYDEVARKLAMVEADLERAEERAETGESKIVELEEELRVVGNNLKSLEVSEEKANQREEAYKEQIKTLTNKLKAAEARAEFAERSVQKLQKEVDRLEDELVNEKEKYKSITDELDQTFSELSGY

SEQ ID NO: 11805 - protein, 274 aa, Panulirus stimpsoni
MKLEKDNAMDRADTLEQQNKEANIRAEKAEEEVHNLQKRMQQLENDLDQVQESLLKANTQLEEKDKALSNAEGEVAALNRRIQLLEEDLERSEERLNTATTKLAEASQAADESERMRKVLENRSLSDEERMDALENQLKEARFLAEEADRKYDEVARKLAMVEADLERAEERAETGESKFVELEEELRVVGNNLKSLEVSEEKANQREEAYKEQIKTLTNKLKAAEARAEFAERSVQKLQKEVDRLEDELVNEKEKYKSITDELDQTFSELSGY

SEQ ID NO: 11806 - protein, 284 aa, Paralithodes camtschaticus
MDAIKKKMQAMKLEKDNAMDKADTLEQQNKEANNRAEKAEEEVHGLQKRMQQLENDLDQVQESLLKANTQLEDKDKALSNAEGEVAALNRRIQLLEEDLERSEERLNTATTKLAEASQAADESERMRKVLENRSLSDEERMDALENQLKEARFLAEEADRKYDEVARKLAMVEADLERAEERAETGESKIVELEEELRVVGNNLKSLEVSEEKANQREEAYKEQIKTLANKLKAAEARAEFAERSVQKLQKEVDRLEDELVNEKEKYKSITDELDQTFSELSGY

SEQ ID NO: 11807 - protein, 284 aa, Penaeus aztecus
MDAIKKKMQAMKLEKDNAMDRADTLEQQNKEANNRAEKSEEEVHNLQKRMQQLENDLDQVQESLLKANIQLVEKDKALSNAEGEVAALNRRIQLLEEDLERSEERLNTATTKLAEASQAADESERMRKVLENRSLSDEERMDALENQLKEARFLAEEADRKYDEVARKLAMVEADLERAEERAETGESKIVELEEELRVVGNNLKSLEVSEEKANQREEAYKEQIKTLTNKLKAAEARAEFAERSVQKLQKEVDRLEDELVNEKEKYKSITDELDQTFSELSGY

SEQ ID NO: 11808 - protein, 284 aa, Penaeus japonicus; identical to SEQ ID NO: 11807

SEQ ID NO: 11809 - protein, 284 aa, Penaeus monodon; identical to SEQ ID NO: 11807

SEQ ID NO: 11810 - protein, 284 aa, Periplaneta americana
MDAIKKKMQAMKLEKDNAMDCALLCEQQARDANLRAEKAEEEARSLQKKIQQIENDLDQTMEQLMQVNAKLDEKDKALQNAESEVAALNRRIQLLEEDLERSEERLATATAKLAEASQAVDESERARKILESKGLADEERMDALENQLKEARFMAEEADKKYDEVARKLAMVEADLERAEERAESGESKIVELEEELRVVGNNLKSLEVSEEKANLREEEYKQQIKTLTTRLKEAEARAEFAERSVQKLQKEVDRLEDELVHEKEKYKFICDDLDMTFTELAGY

SEQ ID NO: 11811 - protein, 284 aa, Periplaneta fuliginosa
MDAIKKKMQAMKLEKDNAMDRALLCEQQARDANLRAEKAEEEARSLQKKIQQIENDLDQTMEQLMQVNAKLDEKDKALQNAESEVAALNRRIQLLEEDLERSEERLATATAKLAEASQAADESERARKILESKGLADEERMDALENQLKEARFMAEEADKKYDEVARKLAMVEADLERAEERAESGESKIVELEEELRVVGNNLKSLEVSEEKANLREEAYKQQIKTLTTRLKEAEARAEFAERSVQKLQKEVDRLEDELVHEKEKYKFICDDLDMTFTELIGN

SEQ ID NO: 11812 - protein, 284 aa, Perna viridis
MDAIKKKMVAMKMEKKNALDRAEQLEQKLRETEEAKAKIEDDYNSLVKKNIQTENDYDNCNTQLQDVQAKYERAEKQIQEHEQEIQSLTRKISLLEEGIMKAEERFTTASGKLEEASKAADESERNRKVLENLNSGNDERIDQLEKQLTEAKWIAEEADKKYEEAARKLAITEVDLERAEARLEAAEAKVIDLEEQLTVVGANIKTLQVQNDQASQREDSYEETIRDLTNRLKDAENRATEAERTVSKLQKEVDRLEDELLTEKEKYKAISDELDATFAELAGY

SEQ ID NO: 11813 - protein, 284 aa, Portunus pelagicus
MDAIKKKMQAMKLEKDDAMDRADTLEQQNKEANIRAEKAEEEVHNLQKRMQQLENDLDQVQESLLKANTQLEEKDKALSNAEGEVAALNRRIQLLEEDLERSEERLNTATTKLAEASQAADESERMRKVLENRSLSDEERMDALENQLKEARFLAEEADRKYDEVARKLAMVEADLERAEERAETGESKIVELEEELRVVGNNLKSLEVSEEKANQREEAYKEQIKTLTNKLKAAEARAEFAERSVQKLQKEVDRLEDELVNEKEKYKSTTDELDQAFSELSGY

SEQ ID NO: 11814 - protein, 284 aa, Portunus sanguinolentus
MDAIKKKMQAMKLEKDNAMDRADTLEQQNKEANLRAEKTEEEIRATQKKMQQVENELDQAQEQLSAANTKLDEKEKALQNAEGEVAALNRRIQLLEEDLERSEERLNTATTKLAEASQAADESERMRKVLENRSLSDEERMDALENQLKEARFLAEEADRKYDEVARKLAMVEADLERAEERAESGESKIVELEEELRVVGNNLKSLEVSEEKANQREETYKEQIKTLANKLKAAEARAEFAERSVQKLQKEVDRLEDELVNEKEKYKSITDELDQTFSELSGY

SEQ ID NO: 11815 - protein, 284 aa, Portunus trituberculatus
MDAIKKKMQAMKLEKDNAMDRANTLEQQNKEANLRAEKTEEEIRATQKKMQQVENELDQAQEQLSAANTKLDEKEKALQNAEGEVAALNRRIQLLEEDLERSEERLNTATTKLAEASQAADESERMRKVLENRSLSDEERMDALENQLKEARFLAEEADRKYDEVARKLAMVEADLERAEERAESGESKIVELEEELRVVGNNLKSLEVSEEKANQREETYKEQIKTLANKLKAAEARAEFAERSVQKLQKEVDRLEDELVNEKEKYKSITDELDQTFSELSGY

SEQ ID NO: 11816 - protein, 284 aa, Procambarus clarkii
MDAIKKKMQATKLEKDNAMDRADTLEQQNKEANIRAEKAEEEVHNLQKRMQHLENDLDQVQESLLKANTQLEEKDKAISNAEGEVAALNRRIQLLEEDLERSEERLNTATTKLAEASQAADESERMRKVLENRSLSDEERMDALENQLKEARFLAEEADRKYDEVARKLAMVEADLERAEERAETGESKIVELEEELRVVGNNLKSLEVSEEKANQREEAYKEQIKTLANKLKAAEARAEFAERSVQKLQKEVDRLEDELVNEKEKYKSITDELDQTFSELTGY

SEQ ID NO: 11817 - protein, 284 aa, Pseudocardium sachalinense
MDSIKKKMQAMKIEKENALDKSEQLDQKLKDVEETKAKVEEDLSSLQKKYTNLENEFDKVNEQYNESVVKLEASEKRVTECEDEIKGYTRRIQLLEDDLERTQVKLDEALLKLEDATKTADESERGRKVLESRSIADDDRIDGLEKQVKDAKYVAEEADRKYDEAARKLAITEVDLERAETRLEAAEAKITELSEELSVVANNCKALQNAVDQASQREDSYEETIRDLTQRLKDAENRAAEAERVVNKLQKEVDRLEDELLAEKEKYKTISDELDQTFAELAGM

SEQ ID NO: 11818 - protein, 284 aa, Scapharca broughtonii
MDSIKKKMIAMKMEKENALDRSEQLEQKLRDTEEQKAKVEEELGAYQKKFSILENDFDTVNTKWEDASVKLEEAEKKLTESEQEIASLTRKTTLLEDDIAKNEEKLMSATQKLEEASHAADESERGRKVLESRSFADDERIDALEAQLKEAKYIAEDADRKYDEAARKLAITEVDLERAEARLEAAEAKIIELEEELTVVGANIKTLQVQNDQASQREDSYEETIRDLTANLKDAENRATEAERTVSKLQKEVDRLEDELLAEKERYKAISDELDQTFAELAGY

SEQ ID NO: 11819 - protein, 284 aa, Scylla serrata; identical to SEQ ID NO: 11814

SEQ ID NO: 11820 - protein, 284 aa, Sepia esculenta
MDAIKKKMLAMKMEKEVATDKAEQTEQSLRDLEDAKNKTEEDLSTLQKKYSNLENDFDNANEQLTAANTNLEASEKRVAECESEIQGLNRRIQLLEEDLERSEERLTSAQSKLEDASKAADESERGRKVLENRSQGDEERIDLLEKQLEEAKWIAEDADRKFDEAARKLAITEVDLERAEARLEAAEAKIVELEEELKVVGNNMKSLEISEQEASQREDSYEETIRDLTHRLKEAENRAAEAERTVSKLQKEVDRLEDELLAEKERYKSISDELDQTFAELAGY

SEQ ID NO: 11821 - protein, 284 aa, Sepioteuthis lessoniana
MDAIKKKMLAMKMEKEVATDKAEQTEQSLRDLEDAKNKIEEDLSTLQKKYANLENDFDNANEQLTAANTNLEASEKRVAECESEIQGLNRRIQLLEEDLERSEERFSSAQSKLEDASKAADESERGRKVLENRSQGDEERIDLLEKQLEEAKWIAEDADRKFDEAARKLAITEVDLERAEARLEAAEAKIVELEEELKVVGNNMKSLEISEQEASQREDSYEETIRDLTHRLKEAENRAAEAERTVSKLQKEVDRLEDELLAEKERYKTISDELDQTFAELAGY

SEQ ID NO: 11822 - protein, 284 aa, Sinonovacula constricta
MDAIKKKMQAMKIEKENALDKSEQLENKLKEIEDVKVKIEEDLTSLQKKYTNQENEYDKVNEQFNESTVKLEASEKRVTECEDEIKGFTRRIQLLEDELERTQQKAEEAVLKLEEASKAADESERGRKVLESRSIADDDRIDKLEKDVKDSKYLAEEADRKYDEAARKLAITEVDLERAETRLEAAESKITELSEELQVVGNNCKALQNAVDQASQREDSYEETIRDLTQRLKDAENRAAEAERVVNKLQKEVDRLEDELLQEKEKYKQISDELDQTFAELAGM

SEQ ID NO: 11823 - protein, 284 aa, Solen strictus
MDSIKKKMQAMKLEKENALDKSEQLEQKLKETEDSKARAEEDLSSLQKKFTNLENEFDKVNEQYQEGVIKLEASEKRVTECEDEIKGFTRRIQLLEDDLERTQAKLDEALLKLEDASKTADESERGRKVLESRSIADDDRIDQLEKQVKDAKYVAEEADRKYDEAARKLAITEVDLERAETRLEAAEAKITELSEELQVVGNNSKALQNAVDQASQREDSYEETIRDLTQRLKDAENRAAEAERVVNKLQKEVDRLEDELLAEKEKYKQISDELDQTFAELAGM

SEQ ID NO: 11824 - protein, 284 aa, Todarodes pacificus
MDAIKKKMLAMKMEKEVATDKAEQTEQSLRDLEAAKNTIEEDLSTLQKKYSNLENDFDNAKENLTVANTNLEASEKRVNECESEIQGLNRRIQLLEEDLERSEERLTSAQSKLEDASKAADESERGRKVLENRSQGDEERIDLLEKQLEEAKWIAEDADRKFDEAARKLAITEVDLERAEARLEAAEAKIVELEEELKVVGNNMKSLEISEQEASQREDSYEETIRDLTHRLKEAENRAAEAERTVSKLQKEVDRLEDELLAEKERYKSISDELDQTFAELAGY

SEQ ID NO: 11825 - protein, 284 aa, Tresus keenae
MDSIKKKMQAMKIEKENALDKAEQLDQKLKDTEDSKAKIEEDLSSLQKKYTNLENEFDQVNEKYNDGVVKLESSEKRVTECEDEIKGYTRRIQLLEDDLERTQVKLEEATLKLEDATKTADESERGRKVLESRSIADDDRIDQLEKQVKDAKYVAEEADRKYDEAARKLAITEVDLERAETRLEAAEAKITELSEELSVVANNCKALQNAVDQASQREDSYEETIRDLTQRLKDAENRASEAERVVNKLQKEVDRLEDELLAEKEKYKQISDELDQTFAELAGM

SEQ ID NO: 11826 - protein, 284 aa, Turbo cornutus
MDAIKKKMLAMKMEKENALDRAEQLEQKLRDTEEQKAKIEEDLNNLQKKCANLENDFDNVNEQLQDALSKLENSEKRVTEMEQEVSGTTRKITLLEEDLERNEEGLQTATERLEEASKAANESERGSLADDERIDQLEAQLKEAKYIAEDAKYIAEDAERKYDEAARKLAITEVDLERAEARLEAAEAKILELEEELKVVGNNMKSLEISEQEASQREDSYEETIRDLTQRLKDAENRATEAERTVSKLQKEVDRLEDELLAEKEKYKAISDELDQTFAELAGY

SEQ ID NO: 11827 - protein, 284 aa, Tyrophagus putrescentiae
MDAIKNKMQAMKLEEDNAIDRAEIAEQKARDANLKSEKTEEEVRALQKKIQQIENELDQVQENLTQATTKLEEKEKALQTAEADVAALNRRIQLIEEDLERSEERLKVATAKLEEASHSADESERMRKMLEHRSITDEERMDGLESQLKEARLMAEDADRKYDEVARKLAMVEADLERAEERAETGESKIVELEEELRVVGNNLKSLEVSEEKAQQREEAYEQQIRIMTSKLKEAEARAEFAERSVQKLQKEVDRLEDELVHEKEKYESISDELDQTFAELTGY

SEQ ID NO: 11828 - protein, 284 aa, Venerupis philippinarum
MDAIKKKMQAMKLEKENALDKAEQLEQKLRDVEETKAKAEEDLTLLQKKYTNLENEFDQVNEKYNEGVNKLEVSEKRVTEAEDEIKGYTRRIQLLEDDLERTQVKLDEATSKLEDATKTADESERGRKVLESRSIADDDRIDALEKQVKDAKYVAEEADRKYDEAARKLAITEVDLERSETRLEAAEAKITELSEELAVVGNNCKALQNAVDQASQREDSYEETIRDLTQRLKDAENRAAEAERVVNKLQKEVDRLEDELLAEKEKYKAISDELDQTFAELAGM

SEQ ID NO: 11829 - protein, 284 aa, Salmo salar
MDAIKKKMQMLKLDKENALDRAEGAEGDKKAAEDKSKQLEDDLVALQKKLKGTEDELDKYSESLKDAQEKLEVAEKTATDAEADVASLNRRIQLVEEELDRAQERLATALTKLEEAEKAADESERGMKVIENRASKDEEKMELQDIQLKEAKHIAEEADRKYEEVARKLVIIESDLERTEERAELSEGKCSELEEELKTVTNNLKSLEAQAEKYSQKEDKYEEEIKVLTDKLKEAETRAEFAERSVAKLEKTIDDLEDELYAQKLKYKAISEELDNALNDMTSI

SEQ ID NO: 11830 - protein, 159 aa, Actinidia chinensis
MGVVTYDMEIPSKVPPVKLYKAFILDGDTLVPKVLPHAIKCVKILEGDGCAGTIKEVTFGEGSHHKCVKQRVDAIDKDNLTYSYTIIEGDVLAEKFESISYHIKIVACPDGGSICKNRSIYTTKGDCKVSEEEIKLGKEKAAEIFKALEAYLLANPDYC

SEQ ID NO: 11831 - protein, 150 aa, Actinidia deliciosa
MDLSGKMVKQVEILSDGIVFYEIFRYRLYLISEMSPVNIQGVDLLEGNWGTVGSVIFFKYTIDGKEKTAKDIVEAIDEETKSVTFKIVEGDLMELYKTFIIIVQVDTKGEHNSVTWTFHYEKLKEDVEEPNTLMNFCIEITKDIETYHLK

SEQ ID NO: 11832 - protein, 157 aa, Prunus armeniaca
MGAITYDMEIPSSISAEKMFKAFVLDGDTIIPKALPHAITGVQTLEGDGGVGTIKLTTFGEGSVHKSVKHRIDGLDKENFTYSYSIIEGGALDVFESISYHIKIVATPDGGCICKNRSIYTPKCDAQVSEEEIKAGKERASGIFKKVEAYLLANPDC

SEQ ID NO: 11833 - protein, 154 aa, Apium graveolens
MGVQTHVLELTSSVSAEKIFQGFVIDVDTVLPKAAPGAYKSVEIKGDGGPGTLKIITLPDGGPITTMTLRIDGVNKEALTFDYSVIDGDILLGFIESIENHVVLVPTADGGSICKTTAIFHTKGDAVVPEENIKYANEQNTALFKALEAYLIAN

SEQ ID NO: 11834 - protein, 160 aa, Alnus glutinosa
MGVFNYEAETPSVIPAARLFKAFILDGDKLLPKVAPEAVSSVENIEGNGGPGTIKKITFPEGSPFKYVKERVDEVDRVNFKYSFSVIEGGAVGDALEKVCNEIKIVAAPDGGSILKISNKFHTKGDHEINAEQIKIEKEKAVGLLKAVESYLLAHSDAYN

SEQ ID NO: 11835 - protein, 160 aa, Betula platyphylla
MGVFNYEDEATSVIAPARLFKSFVLDADNLIPKVAPENVSSAENIEGNGGPGTIKKITFPEGSHFKYMKHRVDEIDHANFKYCYSIIEGGPLGDTLEKISYEIKIVAAPGGGSILKITSKYHTKGDISLNEEEIKAGKEKGAGLFKAVENYLVAHPNAYN

SEQ ID NO: 11836 - protein, 160 aa, Betula verrucosa
MGVFNYETETTSVIPAARLFKAFILDGDNLFPKVAPQAISSVENIEGNGGPGTIKKISFPEGFPFKYVKDRVDEVDHTNFKYNYSVIEGGPIGDTLEKISNEIKIVATPDGGSILKISNKYHTKGDHEVKAEQVKASKEMGETLLRAVESYLLAHSDAYN

SEQ ID NO: 11837 - protein, 157 aa, Arachis hypogaea
MGVFTFEDEITSTVPPAKLYNAMKDADSITPKIIDDVKSVEIVEGNGGPGTIKKLTIVEDGETKFILHKVESIDEANYAYNYSVVGGVALPPTAEKITFETKLVEGPNGGSIGKLTLKYHTKGDAKPDEEELKKGKAKGEGLFRAIEGYVLANPTQY

SEQ ID NO: 11838 - protein, 160 aa, Corylus avellana
MGVFNYEVETPSVIPAARLFKSYVLDGDKLIPKVAPQAITSVENVEGNGGPGTIKNITFGEGSRYKYVKERVDEVDNTNFTYSYTVIEGDVLGDKLEKVCHELKIVAAPGGGSILKISSKFHAKGDHEINAEEMKGAKEMAEKLLRAVETYLLAHSAEYN

SEQ ID NO: 11839 - protein, 168 aa, Daucus carota
  misc_feature (35)..(36): Xaa can be any naturally occurring amino acid
LIFLLILSNNILNIMGAQSHSLEITSSVSAEKIFXXIVLDVDTVIPKAAPGAYKSVDVKGDGGAGTVRIITLPEGSPITSMTVRTDAVNKEALTYDSTVIDGDILLEFIESIETHMVVVPTADGGSITKTTAIFHTKGDAVVPEENIKFADAQNTALFKAIEAYLIAN

SEQ ID NO: 11840 - protein, 160 aa, Fagus sylvatica
MGVFTYESETTTVITPARLFKAFVLDADNLIPKVAPQAIKSSEIIEGSGGPGTIKKITFGEGSQFNYVKHRIDEIDNANFTYACTLIEGDAISETLEKIAYEIKLVASPDGGSILKSTSKYHTKGDHEIKEDQIKAGKEEASGIFKAVEAYLLANPAAYH

SEQ ID NO: 11841 - protein, 160 aa, Fragaria ananassa
MGVYTYENEFTSDIPAPKLFKAFVLDADNLIPKIAPQAVKCAEILEGDGGPGTIKKITFGEGSHYGYVKHKIHSIDKVNHTYSYSLIEGDALSENIEKIDYETKLVSAPHGGTIIKTTSKYHTKGDVEIKEEHVKAGKEKAAHLFKLIEGYLKDHPSEYN

SEQ ID NO: 11842 - protein, 158 aa, Glycine max
MGVFTFEDEINSPVAPATLYKALVTDADNVIPKALDSFKSVENVEGNGGPGTIKKITFLEDGETKFVLHKIESIDEANLGYSYSVVGGAALPDTAEKITFDSKLVAGPNGGSAGKLTVKYETKGDAEPNQDELKTGKAKADALFKAIEAYLLAHPDYN

SEQ ID NO: 11843 - protein, 160 aa, Juglans regia
MGVFTYETESTSVIPPARLFKAFVLDADNLIPKVVPQAVKSSEIIEGNGGPGTIKKINFGEGSQYKYVKHRTDAIDEANFTYAYSVIEGDALADKIEKISYETKIVASHEGGSILKSISHYHSKGDHEIKEEDVKDGKEKASGLFKAVEGYLLAHPDAYN

SEQ ID NO: 11844 - protein, 159 aa, Malus domestica
MGVYTFENEFTSEIPPSRLFKAFVLDADNLIPKIAPQAIKQAEILEGNGGPGTIKKITFGEGSQYGYVKHRIDSIDEASYSYSYTLIEGDALTDTIEKISYETKLVACGSGSTIKSISHYHTKGNIEIKEEHVKVGKEKAHGLFKLIESYLKDHPDAYN

SEQ ID NO: 11845 - protein, 156 aa, Morus alba
GVFTFDDEFPSTVAPARFFKAAVLDADNLFPKVAPQAAKSAETVEGNGGPGTVKKITLPDGKYVKQRLDSIDHDNFTYGHSIIEGDVLSADIEKISHVTKFVASSSGGSIIKVTTTFHTVGNAPVDEAKAKEGKEKAEGLFKLVEGYLEANPSAYN

SEQ ID NO: 11846 - protein, 157 aa, Morus bombycis
MGVFTFDDEFTSTVAPARFFKAAVLDADNLFPKVAPQAAKSAETVEGNGGPGTVKKITLPDGKYVKQRLDSIDHDNFTYGHSIIEGDVLSADIEKISHVTKFVASPSGGSIIKVTTTFHTVGDAPVDEAKAKEGKEKAEGLFKLVEGYLEANPSAYN

SEQ ID NO: 11847 - protein, 159 aa, Carpinus betulus
GVFNYEAETPSVIPAARLFKSYVLDGDKLIPKVAPQVISSVENVGGNGGPGTIKNITFAEGIPFKFVKERVDEVDNANFKYNYTVIEGDVLGDKLEKVSHELKIVAAPGGGSIVKISSKFHAKGYHEVNAEKMKGAKEMAEKLLRAVESYLLAHTAEYN

SEQ ID NO: 11848 - protein, 159 aa, Castanea sativa
MGVFTHESQETSVIPPARLFKAFVLDSDNLIPKVLPQAIKSTEIIEGNGGPGTIKKITFGEASKYKYSKHRIDALDPENCTYSFSVIEGDVLTDIENVSTETKFVASPDGGTIMKSTTKYQTKGDFQLKEEQVQAAIEKATGLFKAVEAYLLANPDLYK

SEQ ID NO: 11849 - protein, 160 aa, Ostrya carpinifolia
MGVFNYEAETPSVIPAARLFKSYVLDGDKLIPKVAPQAISKVENVGGNGGPGTIKNITFAEGSPFKFVKERVDEVDNANFKYNYTVIEGDVLGDKLEKVSHELKIVAAPGGGSILKISSKFHAKGDHEVNAEEMKGAKEMAEKLLRAVESYLLAHTAEYN

SEQ ID NO: 11850 - protein, 160 aa, Prunus avium
MGVFTYETEFTSVIPPEKLFKAFILDADNLIPKVAPTAVKGTEILEGDGGVGTIKKVTFGEGSQYAYVKHRVDGIDKDNLSYSYTLIEGDALSDVIENIAYDIKLVASPDGGSIVKTTSHYHTKGDVEIKEEQVKAGKEKAAGLFKLVEAYLLANPDAYN

SEQ ID NO: 11851 - protein, 160 aa, Prunus persica
MGVFTYESEFTSEIPPPRLFKAFVLDADNLVPKIAPQAIKHSEILEGDGGPGTIKKITFGEGSQYGYVKHKIDSIDKENYSYSYTLIEGDALGDTLEKISYETKLVASPSGGSIIKSTSHYHTKGNVEIKEEHVKAGKEKASNLFKLIETYLKGHPDAYN

SEQ ID NO: 11852 - protein, 160 aa, Prunus armeniaca
MGVFTYESEFTSEIPPPRLFKAFVLDADNLVPKIAPQAIKHSEILEGDGGPGTIKKITFGEGSQYGYVKHKIDSIDKENHSYSYTLIEGDALGDNLEKISYETKLVASPSGGSIIKSTSHYHTKGDVEIKEEHVKAGKEKASNLFKLIETYLKGHPDAYN

SEQ ID NO: 11853 - protein, 159 aa, Pyrus communis
MGLYTFENEFTSEIPPPRLFKAFVLDADNLIPKIAPQAIKHAEILEGNGGPGTIKKITFGEGSQYGYVKHRVDSIDEASYSYAYTLIEGDALTDTIEKISYEAKLVASGSGSTIKSISHYHTKGDIEIKEEHVKAGKEKAHGLFKLIESYLKDHPDAYN

SEQ ID NO: 11854 - protein, 137 aa, Rubus idaeus
YTSVIPPPKLFKAFVLDADNLIPKIAPQAVKSVEIIEGDGGVGTVKKIHLGEGTEHSYVKHKIDGLDKVNFVYSYSITEGDALGDKIEKISYEIKLVASGRGSIIKTTSHYHCKGGAEIKEEQVKDGKERAAGLFKI

SEQ ID NO: 11855 - protein, 159 aa, Quercus alba
MGVFTHESQETSVIAPARLFKALFLDSDNLIQKVLPQAIKSTEIIEGNGGPGTIKKITFGEASKFKYAKHRIDALDPENCTYSFSVIEGDALTVMESVSTEIKCVASPDGGSIMKSTTKYQTKGDFQLKEEQIQAAIEKAAGLLKAVEAYLVAHPDLYK

SEQ ID NO: 11856 - protein, 160 aa, Solanum lycopersicum
MGVNTYTYESTTTISPTRLFKALVLDFDNLVPKLLSQHVKNNETIEGDGGVGSIKQMNFVEGGPIKYLKHKIHVIDDKNLETKYSLIEGDILGEKLESITYDIKFEANDNGGCVYKTTTEYHTKGDHVVSEEEHNVGRERIMNISKAVEAYLLANPSVYA

SEQ ID NO: 11857 - protein, 155 aa, Vigna radiata
MAVFTFDDQATSPVAPATLYNALAKDADNIIPKAVGSFQSVEIVEGNGGPGTIKKISFVEDGETKFVLHKIESVDEANLGYSYSIVGGVALPDTAEKITIDTKISDGADGGSLIKLTISYHGKGDAPPNEDELKAGKAKSDALFKAVEAYLLANP

SEQ ID NO: 11858 - protein, 155 aa, Vigna radiata
MVKEFNTQTELSVRLEALWAVLSKDFITVVPKVLPHIVKDVQLIEGDGGVGTILIFNFLPEVSPSYQREEITEFDESSHEIGLQVIEGGYLNQGLSYYKTTFKLSEIEEDKTLVNVKISYDHDSDIEEKVTPTKTSQSTLMYLRRLERYLSNGSA

SEQ ID NO: 11859 - protein, 481 aa, Juglans nigra
GRDRQDPQQQYHRCQRRCQIQEQSPERQRQCQQRCERQYKEQQGRERGPEASPRRESKGREEEQQRHNPYYFHSQSIRSRHESEEGEVKYLERFAERTELLRGIENYRVVILDANPNTFMLPHHKDAESVIVVTRGRATLTLVSQETRESFNLECGDVIRVPAGATEYVINQDSNERLEMVKLLQPVNNPGQVREYYAAGAKSPDQSYLRVFSNDILVAALNTPRDRLERFFDQQEQREGVIIRASQEKLRALSQHAMSAGQRPWGRRSSGGPISLKSERPSYSNQFGQFFEACPEEHRQLQEMDVLVNYAEIKRGAMMVPHYNSKATVVVYVVEGTGRYEMACPHVSSQSFEDQGRREQEEEESTGRFQKVTARLARGDIFVIPAGHPIAITASQNENLRLLGFGINGENNQRNFLAGQNSIINQLEREAKELSFNMPREEIEEIFESQMESYFVPTERQSRRGQGRDHPLASILGFAFF

SEQ ID NO: 11860 - protein, 510 aa, Juglans nigra
MAKPILLSISLCLVALVNGCLAQSGGRQQPRFGECKLKRLVALEPSNRIEAEAGVIESWDPNNQQFQCAGVAVVRRTIEPNGLLLPQYSNAPQLLYIVKGRGITGVLFPGCPETFEESQQGQSRIRPSLRSASFQRDRHQKIRHFREGDVIAFPAGVAHWCYNDGDTPVVAVALMDTTNNANQLDQNPRNFYLAGNPDDEFRPQGQQEYEQHRRQQQHQQRHGEPGQQQRGSGNNVFSGFDADFLADAFNVDTETARRLQSENDHRRSIVRVEGRQLQVIRPRWSREEQEREERKERERERESESERRQSRRGGRDDNGLEETICTLRLRENIGDPSRADIYTEEAGRISTANSHTLPVLRWLQLSAERGALYSDALYVPHWNLNAHSVVYALRGRAEVQVVDNFGQTVFDDELREGQLLTIPQNFAVVKRARNEGFEWVSFKTNENAMVSPLAGRTSAIRALPEEVLANALQIPREDARRLKFNRQESTLVRSRPSSSRSSRSERRAEV

SEQ ID NO: 11861 - protein, 139 aa, Juglans nigra
AALLVALLFVANAAAFRTTITTMEIDEDIDNPRRRGEGCREQIQRQQNLNHCQYYLRQQSRSGGYDEDNQRQHFRQCCQQLSQMDEQCQCEGLRQVVRRQQQQQGLRGEEMEEMVQSARDLPNECGISSQRCEIRRSWF

SEQ ID NO: 11862 - protein, 593 aa, Juglans nigra
RGRDDDDEENPRDPREQYRQCQEYCRRQGQGQRQQQQCQIRCEERLEEDQRSQEERERRRGRDVDDQNPRDPEQRYEQCQQQCERQRRGQEQTLCRRRCEQRRQQEERERQRGRDRQDPQQQYHRCQRRCQIQEQSPERQRQCQQRCERQYKEQQGRERGPEASPRRESRGREEEQQRHNPYYFHSQSIRSRHESEEGEVKYLERFTERTELLRGIENYRVVILDANPNTSMLPHHKDAESVAVVTRGRATLTLVSQETRESFNLECGDVIRVPAGATVYVINQDSNERLEMVKLLQPVNNPGQFREYYAAGAKSPDQSYLRVFSNDILVAALNTPRDRLERFFDQQEQREGVIIRASQEKLRALSQHAMSAGQRPWGRRSSGGPISLKSESPSYSNQFGQFFEACPEEHRQLQEMDVLVNYAEIKRGAMMVPHYNSKATVVVYVVEGTGRYEMACPHVSSQSYEGQGRREQEEEESTGRFQKVTARLARGDIFVIPAGHPIAITASQNENLRLLGFDINGENNQRDFLAGQNNIINQLEREAKELSFNMPREEIEEIFESQMESYFVPTERQSRRGQGRDHPLASILDFAFF

SEQ ID NO: 11863 - protein, 119 aa, Juglans nigra
MTGSLVLKLSGMVLLCMVVAAPVAEAVITCGQVASSVGSCIGYLRGTVPTVPPSCCNGVKSLNKAAATTADRQAACECLKKTSGSIPGLNPGLAAGLPGKCGVSVPYKISTSTNCKAVK

SEQ ID NO: 11864 - protein, 507 aa, Juglans nigra
MAKPILLSIYLFLIVALFNGCLAQSGGRQQQQFGQCQLNRLDALEPTNRIEAEAGVIESWDPNNQQFQCAGVAVVRRTIEPNGLLLPQYSNAPQLVYIARGRGITGVLFPGCPETFEESQRQSQQGQSREFQQDRHQKIRHFREGDIIAFPAGVAHWSYNDGSNPVVAISLLDTNNNANQLDQNPRNFYLAGNPDDEFRPQGQQEYEQHRRQQQRQQRPGEHGQQQRGLGNNVFSGFDADFLADAFNVDTETARRLQSENDHRRSIVRVEGRQLQVIRPRWSREEQEREERKERERERESESERRQSRRGGRDDNGLEETICTLRLRENIGDPSRADIYTEEAGRISTVNSHTLPVLRWLQLSAERGALYSDALYVPHWNLNAHSVVYALRGRAEVQVVDNFGQTVFDDELREGQLLTIPQNFAVVKRARNEGFEWVSFKTNENAMVSPLAGRTSAIRALPEEVLATAFQIPREDARRLKFNRQESTLVRSRPSRSRSSRSERRAEV

SEQ ID NO: 11865 - protein, 160 aa, Juglans nigra; identical to SEQ ID NO: 11843

SEQ ID NO: 11866 - skipped

SEQ ID NO: 11867 - protein, 131 aa, Juglans nigra
MSWQTYVDEHLMCEIDGQHLTAAAIIGHDGSVWAQSSSFPQFKPEEIAAIMKDFDEPGSLAPTGLHLGGTKYMVIQGEAGAVIRGKKGAGGITVKKTGQALIFGIYDEPLTPGQCNMIVERLGDYLVEQGL

SEQ ID NO: 11868 - skipped

SEQ ID NO: 11869 - protein, 626 aa, Arachis hypogaea
MRGRVSPLMLLLGILVLASVSATHAKSSPYQKKTENPCAQRCLQSCQQEPDDLKQKACESRCTKLEYDPRCVYDPRGHTGTTNQRSPPGERTRGRQPGDYDDDRRQPRREEGGRWGPAGPREREREEDWRQPREDWRRPSHQQPRKIRPEGREGEQEWGTPGSHVREETSRNNPFYFPSRRFSTRYGNQNGRIRVLQRFDQRSRQFQNLQNHRIVQIEAKPNTLVLPKHADADNILVIQQGQATVTVANGNNRKSFNLDEGHALRIPSGFISYILNRHDNQNLRVAKISMPVNTPGQFEDFFPASSRDQSSYLQGFSRNTLEAAFNAEFNEIRRVLLEENAGGEQEERGQRRWSTRSSENNEGVIVKVSKEHVEELTKHAKSVSKKGSEEEGDITNPINLREGEPDLSNNFGKLFEVKPDKKNPQLQDLDMMLTCVEIKEGALMLPHFNSKAMVIVVVNKGTGNLELVAVRKEQQQRGRREEEEDEDEEEEGSNREVRRYTARLKEGDVFIMPAAHPVAINASSELHLLGFGINAENNHRIFLAGDKDNVIDQIEKQAKDLAFPGSGEQVEKLIKNQKESHFVSARPQSQSQSPSSPEKESPEKEDQEEENQGGKGPLLSILKAFN

SEQ ID NO: 11870 - protein, 156 aa, Arachis hypogaea
MAKLTILVALALFLLAAHASARQQWELQGDRRCQSQLERANLRPCEQHLMQKIQRDEDSYERDPYSPSQDPYSPSPYDRRGAGSSQHQERCCNELNEFENNQRCMCEALQQIMENQSDRLQGRQQEQQFKRELRNLPQQCGLRAPQRCDLDVESGG

SEQ ID NO: 11871 - protein, 507 aa, Arachis hypogaea
RQQPEENACQFQRLNAQRPDNRIESEGGYIETWNPNNQEFECAGVALSRLVLRRNALRRPFYSNAPQEIFIQQGRGYFGLIFPGCPRHYEEPHTQGRRSQSQRPPRRLQGEDQSQQQRDSHQKVHRFDEGDLIAVPTGVAFWLYNDHDTDVVAVSLTDTNNNDNQLDQFPRRFNLAGNTEQEFLRYQQQSRQSRRRSLPYSPYSPQSQPRQEEREFSPRGQHSRRERAGQEEENEGGNIFSGFTPEFLEQAFQVDDRQIVQNLRGETESEEEGAIVTVRGGLRILSPDRKRRADEEEEYDEDEYEYDEEDRRRGRGSRGRGNGIEETICTASAKKNIGRNRSPDIYNPQAGSLKTANDLNLLILRWLGPSAEYGNLYRNALFVAHYNTNAHSIIYRLRGRAHVQVVDSNGNRVYDEELQEGHVLVVPQNFAVAGKSQSENFEYVAFKTDSRPSIANLAGENSVIDNLPEEVVANSYGLQREQARQLKNNNPFKFFVPPSQQSPRAVA

SEQ ID NO: 11872 - skipped

SEQ ID NO: 11873 - protein, 131 aa, Arachis hypogaea
MSWQTYVDNHLLCEIEGDHLSSAAILGQDGGVWAQSSHFPQFKPEEITAIMNDFAEPGSLAPTGLYLGGTKYMVIQGEPGAIIPGKKGPGGVTIEKTNQALIIGIYDKPMTPGQCNMIVERLGDYLIDTGL

SEQ ID NO: 11874 - protein, 129 aa, Arachis hypogaea
AHASAMRRERGRQGDSSSCERQVDGVNLKPCEQHIMQRIMGEQEQYDSYNFGSTRSSDQQQRCCDELNEMENTQRCMCEALQQIMENQCDGLQDRQMVQHFKRELMNLPQQCNFGAPQRCDLDVSGGRC

SEQ ID NO: 11875 - protein, 160 aa, Arachis hypogaea
MMVKLSILVALLGALLVVASATRWDPDRGSRGSRWDAPSRGDDQCQRQLQRANLRPCEEHMRRRVEQEQEQEQDEYPYSRRGSRGRQPGESDENQEQRCCNELNRFQNNQRCMCQALQQILQNQSFWVPAGQEPVASDGEGAQELAPELRVQVTKPLRPL

SEQ ID NO: 11876 - protein, 157 aa, Arachis hypogaea; identical to SEQ ID NO: 11837

SEQ ID NO: 11877 - protein, 116 aa, Arachis hypogaea
MASLKFAFVMLVCMAMVGAPMVNAISCGQVNSALAPCIPFLTKGGAPPPACCSGVRGLLGALRTTADRQAACNCLKAAAGSLRGLNQGNAAALPGRCGVSIPYKISTSTNCATIKF

SEQ ID NO: 11878 - protein, 169 aa, Arachis hypogaea
MTDRTQPHTVQVHTTAGRFGDTAAGTNRYPDRGPSTSKVIAVITGLPIGGTLLLFAGLALAGTLLGLAVTTPLFILFSPVIVPAIIVVGLSVAGFLTSGACGLTGLSSFSWVMNYIRQTHGSVPEQLEMAKHRMADVAGYVGQKTKDVGQKTKEVGQEIQTKAQDSKRT

SEQ ID NO: 11879 - protein, 137 aa, Arachis hypogaea
MAEALYYGGRQRQEQPRSTQLVKATTAVVAGGSLLILAGLVLAGTVIGLTTITPLFVIFSPVLVPAVITVALLGLGFLASGGFGVAAITVLTWIYRYVTGKHPPGANQLDTARHKLMGKAREIKDFGQQQTSGAQAS

SEQ ID NO: 11880 - protein, 71 aa, Arachis hypogaea
KTVAGFCIFFLVLFLAQEGVVKTEAKLCNHLADTYRGPCFTNASCDDHCKNKEHFVSGTCMKMACWCAHNC

SEQ ID NO: 11881 - protein, 79 aa, Arachis hypogaea
VQKRTIIMEKKMAGFCIFFLILFLAQEYGVEGKECLNLSDKFKGPCLGSKNCDHHCRDIEHLLSGVCRDDFRCWCNRKC

SEQ ID NO: 11882 - protein, 176 aa, Arachis hypogaea
MATATDRAPHQVQVHTPTTQRVDVPRRGYDVSGGGIKTLLPERGPSTSQIIAVLVGVPTGGTLLLLSGLSLLGTIIGLAIATPVFTFFSPVIVPAVVTIGLAVTGILTAGACGLTGLMSLSWMINFIRQVHGTTVPDQLDSVKRRMADMADYVGQKTKDAGQQIQTKAQDVKRSSS

SEQ ID NO: 11883 - protein, 166 aa, Arachis hypogaea
MSDQTRTGYGGGGSYGSSYGGGGTYGSSYGTSYDPSTNQPIRQAIKFMTASTIGVSFLILSGLILTGTVIGLIIATPLLVIFSPILVPAAITLALAAGGFLFSGGCGVAAIAALSWLYSYVTGKHPAGSDRLDYAKGVIADKARDVKDRAKDYAGAGRAQEGTPGY

SEQ ID NO: 11884 - protein, 68 aa, Arachis hypogaea
VTCTPTELSPCLGAITGGSPPSSVCCQKLRAQKPCLCNYIKNPALRTYVNSPGARRVASSCGVPLPSC

SEQ ID NO: 11885 - protein, 93 aa, Arachis hypogaea
AIQCSFVTKSIAPCFGYLKSGGTVSGPCCSGIQNINGTAKTTSDRQAVCNCLKSAAASLGSQINPNNAASLPGKCGVSIPYKISTSINCSSIK

SEQ ID NO: 11886 - protein, 160 aa, Corylus avellana; identical to SEQ ID NO: 11838

SEQ ID NO: 11887 - protein, 131 aa, Corylus avellana
MSWQTYGDEHLMCEIEGNRLAAAAIIGHDGSVWAQSSTFPQLKPEEITGVMNDFNEPGSLAPTGLYLGGTKYMVIQGEPGAVIRRKKGPGGVTVKKTSQALIIGIYDEPMTPGQCNMIVERLGDYLIDQGL

SEQ ID NO: 11888 - protein, 308 aa, Corylus avellana
MAQKSKILFIGGTGYIGKFIVEASLKAGHPTFVLVRESTVSDPVKGKLVEKFKSSGATLVHGDLYDHGSLVKAIKHVDVVISTVGHLQLADQVKIIAAIKEAGNVKRFFPSEFGNDVDRVHAVEPAKTAFATKVEIRRKIEAEGIPYTYVSSNYFAGYFLPTLAQPGLTAPPRDKVTIFGDGHVKAIFNKEDDIGTYTIRAVDDPRTLNKVLYLRPAKNIYSFNELVALWEKKIGKTLEKIHLTEEKILKDIQESPIPINVILSINHSVFVKGDHTNFEIEESFGVEASQLYPDVKYTTVEEYLQQFV

SEQ ID NO: 11889 - protein, 115 aa, Corylus avellana
MGSLKLVCAVLLCMMVAAPVARASLTCPQIKGNLTPCVLYLKNGGVLPPSCCKGVRAVNDASRTTSDRQSACNCLKDTAKGIAGLNPNLAAGLPGKCGVNIPYKISPSTNCNNVK

SEQ ID NO: 11890 - protein, 515 aa, Corylus avellana
MAKLILVSFSLCLLVLFNGCLGINVGLRRQQQRYFGECNLDRLNALEPTNRIEAEACQIESWDHNDQQFQCAGVAVIRRTIEPNGLLLPQYSNAPELIYIERGRGITGVLFPGCPETFEDPQQQSQQGQRQGQGQSQRSEQDRHQKIRHFREGDIIALPAGVAHWCYNDGDSPVVTVSLLHTNNYANQLDENPRHFYLAGNPDDEHQRQGQQQFGQRRRQQQHSHGEQGEQEQQGEGNNVFSGFDAEFLADAFNVDVDTARRLQSNQDKRRNIVKVEGRLQVVRPERSRQEWERQERQERESEQERERQRRQGGRGRDVNGFEETICSLRLRENICTRSRADIYTEQVGRINTVNSNTLPVLRWLQLSAERGDLQREGLYVPHWNLNAHSVVYAIRGRARVQVVDDNGNTVFDDELRQGQVLTIPQNFAVAKRAESEGFEWVAFKTNDNAQISPLAGRTSAIRALPDDVLANAFQISREEARRLKYNRQETTLVRSSRSSSERKRRSESEGRAEA

SEQ ID NO: 11891 - protein, 668 aa, Corylus avellana
MAGSWRARGSLVVLAILLFGCLFAISIAKEEATKLGTVIGIDLGTTYSCVGVYKNGHVEIIANDQGNRITPSWVGFTDGERLIGEAAKNQAAVNPERTIFDVKRLIGRKFEDKEVQKDMKLVPYKIVNKDGKPYIQVKIKDGETKVFSPEEISAMILIKMKETAEAFLGKKIKDAVVTVPAYFNDAQRQATKDAGIIAGLNVARIINEPTAAAIAYGLDKKGGEKNILVFDLGGGTFDVSILTIDNGVFEVLSTNGDTHLGGEDFDMRIMEYFIKLIKKKHGKDISKDNRAIGKLRREAERAKRALSSQHQVRVEIESLFDGVDFSEPLTRARFEELNNDFVQKDHGTREEAMEDAGLAKNQIDEIVLVGGSTRIPKVQQLLKDYFDGKEPNKGVNPDEAVAYGAAVQGSILSGEGGEETKDILLLDVAPLTLGIETVGGVMTKLIPRNTVIPTKKSQVFTTYQDQQTTVSIQVFEGERSLTKDCRNLGKFDLTGVPPAPRGTPQIEVTFEVDANGILNVKAEDKGTGKSEKITITNDKGRLSQEEIDRMVQEAEEFAEEDKKVKERIDARNTLETYVYNMKNQVNDKDKLADKLESDEKDKIESAVKDALEWLDDNQSAEKEDYDEKLKEVEAVCNPIITAVYQRSGGAPGGGSGEEDEDSESHDEL

SEQ ID NO: 11892 - protein, 448 aa, Corylus avellana
MLPKEDPELKKCKHKCRDERQFDEQQRRDGKQICEEKARERQQEEGNSSEESYGKEQEENPYVFQDEHFESRVKTEEGRVQVLENFTKRSRLLSGIENFRLAILEANPHTFISPAHFDAELVLFVAKGRATITMVREEKRESFNVEHGDIIRIPAGTPVYMINRDENEKLFIVKILQPVSAPGHFEAFYGAGGEDPESFYRAFSWEVLEAALKVRREQLEKVFGEQSKGSIVKASREKIRALSQHEEGPPRIWPFGGESSGPINLLHKHPSQSNQFGRLYEAHPDDHKQLQDLDLMVSFANITKGSMAGPYYNSRATKISVVVEGEGFFEMACPHLSSSSGSYQKISARLRRGVVFVAPAGHPVAVIASQNNNLQVLCFEVNAHGNSRFPLAGKGNIVNEFERDAKELAFNLPSREVERIFKNQDQAFFFPGPNKQQEEGGRGGRAFE

SEQ ID NO: 11893 - protein, 159 aa, Corylus avellana
MADRPQQLQVHPQRGHGHYEGGIKNQRGGGPSAVKVMAVLAALPVGGTLLALAGLTLAGSVIGLLVTSPLFIIFSPVLVPAAIVVGLAVASFLSSGALGLTGLSSLSWVLNYLRCASQSLPREMDQAKRRMQDMAAFVGQKTREVGQEIQSRAQEGRRT

SEQ ID NO: 11894 - protein, 140 aa, Corylus avellana
MAEHPRQLQDPAHQPRSHQVVKAATAATAGGSLLVPSGLILAGTVIALTLATPLFVIFSPVLVPAVITVSLIIMGFLASGGFGVAAVTVLSWIYRYVTGRHPPGADQLDHARMKLASKAREMKDRAEQFGQQHVTGSQGS

SEQ ID NO: 11895 - protein, 147 aa, Corylus avellana
MARLATLAALFAALLLVAHAAAFRTTITTVDVDEDIVNQQGRRGESCREQAQRQQNLNQCQRYMRQQSQYGSYDGSNQQQQQELEQCCQQLRQMDERCRCEGLRQAVMQQQGEMRGEEMREVMETARDLPNQCRLSPQRCEIRSARF

SEQ ID NO: 11896 - skipped

SEQ ID NO: 11897 - protein, 42 aa, Glycine max
  misc_feature (8)..(8): Xaa can be any naturally occurring amino acid
  misc_feature (14)..(14): Xaa can be any naturally occurring amino acid
  misc_feature (28)..(29): Xaa can be any naturally occurring amino acid
  misc_feature (36)..(36): Xaa can be any naturally occurring amino acid
  misc_feature (38)..(39): Xaa can be any naturally occurring amino acid
ALITRPSXPDLSIXLNILGGSLGTVDDXXALIGGLXDXXAIV

SEQ ID NO: 11898 - skipped

SEQ ID NO: 11899 - protein, 131 aa, Glycine max
MSWQAYVDDHLLCDIEGNHLTHAAIIGQDGSVWAQSTDFPQFKPEEITAIMNDFNEPGSLAPTGLYLGGTKYMVIQGEPGAVIRGKKGPGGVTVKKTGAALIIGIYDEPMTPGQCNMVVERPGDYLIDQGY

SEQ ID NO: 11900 - protein, 158 aa, Glycine max; identical to SEQ ID NO: 11842

SEQ ID NO: 11901 - protein, 543 aa, Glycine max
VEKEECEEGEIPRPRPRPQHPEREPQQPGEKEEDEDEQPRPIPFPRPQPRQEEEHEQREEQEWPRKEEKRGEKGSEEEDEDEDEEQDERQFPFPRPPHQKEERKQEEDEDEEQQRESEESEDSELRRHKNKNPFLFGSNRFETLFKNQYGRIRVLQRFNQRSPQLQNLRDYRILEFNSKPNTLLLPNHADADYLIVILNGTAILSLVNNDDRDSYRLQSGDALRVPSGTTYYVVNPDNNENLRLITLAIPVNKPGRFESFFLSSTEAQQSYLQGFSRNILEASYDTKFEEINKVLFSREEGQQQGEQRLQESVIVEISKEQIRALSKRAKSSSRKTISSEDKPFNLRSRDPIYSNKLGKFFEITPEKNPQLRDLDIFLSIVDMNEGALLLPHFNSKAIVILVINEGDANIELVGLKEQQQEQQQEEQPLEVRKYRAELSEQDIFVIPAGYPVVVNATSNLNFFAIGINAENNQRNFLAGSQDNVISQIPSQVQELAFPGSAQAVEKLLKNQRESYFVDAQPKKKEEGNKGRKGPLSSILRAFY

SEQ ID NO: 11902 - protein, 495 aa, Glycine max
MAKLVFSLCFLLFSGCCFAFSSREQPQQNECQIQKLNALKPDNRIESEGGLIETWNPNNKPFQCAGVALSRCTLNRNALRRPSYTNGPQEIYIQQGKGIFGMIYPGCPSTFEEPQQPQQRGQSSRPQDRHQKIYNFREGDLIAVPTGVAWWMYNNEDTPVVAVSIIDTNSLENQLDQMPRRFYLAGNQEQEFLKYQQEQGGHQSQKGKHQQEEENEGGSILSGFTLEFLEHAFSVDKQIAKNLQGENEGEDKGAIVTVKGGLSVIKPPTDEQQQRPQEEEEEEEDEKPQCKGKDKHCQRPRGSQSKSRRNGIDETICTMRLRHNIGQTSSPDIYNPQAGSVTTATSLDFPALSWLRLSAEFGSLRKNAMFVPHYNLNANSIIYALNGRALIQVVNCNGERVFDGELQEGRVLIVPQNFVVAARSQSDNFEYVSFKTNDTPMIGTLAGANSLLNALPEEVIQHTFNLKSQQARQIKNNNPFKFLVPPQESQKRAVA

SEQ ID NO: 11903 - protein, 643 aa, Glycine max
MASEQLARRENTTTEKEIHVEKHRVPKMATHFEHLAEQAKESDITAGKDTPQGSIEALQAGERVKDHAGKAMGDIGGRGKARETHELGAHFESLADKVTDHAAANVVGNKESQREARGGVRDVGKFEMRTEGGEKGNKDRPELKTRTREVIGRTEKERGRESGGQVVAEKGRETETARGRVGAENEGARTTAVITCTLEKGGGTQKPIREEERESESERSAWEQISNYSDQATQGVKEKYERAKQAASETLNTTTQTAQEKSAQAKNLAAQAKDATLEKGQQGYAVTKDTISSAAKTASEKTAPVAEKAKDYTLQAAEKAKSAGGTTASYVGEKAVQAKDVAVESGKSAAGYAAKVAADLRDKATAVGWAAAHFSAEKTVEGTKAAAHVVEGAAGYAGHKAAELASMSAGAVKGLAASAGETAKEYTAKKKEEAQRELEAKKPSQPQEAEERPSEGIGETVRQYAQKPKPSERNPQKEGTGSIVFTAIGETVSSAGEKVKKPFKNTTGGESEGGGGKEEGKSVIGKSLTSIGEKLGDAKQREELLDNVTGNITEGGGEVLGAVGETVAEIGQNMMKPAEIVQERAHVRQAGGVLDAIGETIAEIAETTRVMVSGEDERVLRQSVVLETRVTGRAKHEEGSHGA

SEQ ID NO: 11904 - protein, 158 aa, Glycine max
MTKFTILLISLLFCIAHTCSASKWQHQQDSCRKQLQGVNLTPCEKHIMEKIQGRGDDDDDDDDDNHILRTMRGRINYIRRNEGKDEDEEEEGHMQKCCTEMSELRSPKCQCKALQKIMENQSEELEEKQKKKMEKELINLATMCRFGPMIQCDLSSDD

SEQ ID NO: 11905 - protein, 153 aa, Sesamum indicum
MAKKLALAAVLLVAMVALASATTYTTTVTTTAIDDEANQQSQQCRQQLQGRQFRSCQRYLSQGRSPYGGEEDEVLEMSTGNQQSEQSLRDCCQQLRNVDERCRCEAIRQAVRQQQQEGGYQEGQSQQVYQRARDLPRRCNMRPQQCQFRVIFV

SEQ ID NO: 11906 - protein, 148 aa, Sesamum indicum
MARFTIVLAVLFAAALVSASAHKTVVTTSVAEEGEEENQRGCEWESRQCQMRHCMQWMRSMRGQYEESFLRSAEANQGQFEHFRECCNELRDVKSHCRCEALRCMMRQMQQEYGMEQEMQQMQQMMQYLPRMCGMSYPTECRMRPIFA

SEQ ID NO: 11907 - protein, 585 aa, Sesamum indicum
MSCGGRLCLVLFALLLASAVVASESKDPELKQCKHQCKAQQQISKEQKEACIQACKEYIRQKHQGEHGRGGGDILEEEVWNRKSPIERLRECSRGCEQQHGEQREECLRRCQEEYQREKGRQDDDNPTDPEKQYQQCRLQCRRQGEGGGFSREHCERRREEKYREQQGREGGRGEMYEGREREEEQEEQGRGRIPYVFEDQHFITGFRTQHGRMRVLQKFTDRSELLRGIENYRVAILEAEPQTFIVPNHWDAESVVFVAKGRGTISLVRQDRRESLNIKQGDILKINAGTTAYLINRDNNERLVLAKLLQPVSTPGEFELFFGAGGENPESFFKSFSDEILEAAFNTRRDRLQRIFGQQRQGVIVKASEEQVRAMSRHEEGGIWPFGGESKGTINIYQQRPTHSNQYGQLHEVDASQYRQLRDLDLTVSLANITQGAMTAPHYNSKATKIALVVDGEGYFEMACPHMSRSRGSYQGETRGRPSYQRVASRLTRGTVVIIPAGHPFVAVASSNQNLQVLCFEVNANNNEKFPLAGRRNVMNQLEREAKELAFGMPAREVEEVSRSQQEEFFFKGPRQQQQGRADA

SEQ ID NO: 11908 - protein, 166 aa, Sesamum indicum
MADRDRPHPHQIQVHPQHPHRYEGGVKSLLPQKGPSTTQILAIITLLPISGTLLCLAGITLVGTLIGLAVATPVFVIFSPVLVPAAILIAGAVTAFLTSGAFGLTGLSSLSWVLNSFRRATGQGPLEYAKRGVQEGTLYVGEKTKQAGEAIKSTAKEGGREGTART

SEQ ID NO: 11909 - protein, 145 aa, Sesamum indicum
MAEHYGQQQQTRAPHLQLQPRAQRVVKAATAVTAGGSLLVLSGLTLAGTVIALTIATPLLVIFSPVLVPAVITIFLLGAGFLASGGFGVAALSVLSWIYRYLTGKHPPGADQLESAKTKLASKAREMKDRAEQFSQQPVAGSQTS

SEQ ID NO: 11910 - protein, 459 aa, Sesamum indicum
MVAFKFLLALSLSLLVSAAIAQTREPRLTQGQQCRFQRISGAQPSLRIQSEGGTTELWDERQEQFQCAGIVAMRSTIRPNGLSLPNYHPSPRLVYIERGQGLISIMVPGCAETYQVHRSQRTMERTEASEQQDRGSVRDLHQKVHRLRQGDIVAIPSGAAHWCYNDGSEDLVAVSINDVNHLSNQLDQKFRAFYLAGGVPRSGEQEQQARQTFHNIFRAFDAELLSEAFNVPQETIRRMQSEEEERGLIVMARERMTFVRPDEEEGEQEHRGRQLDNGLEETFCTMKFRTNVESRREADIFSRQAGRVHVVDRNKLPILKYMDLSAEKGNLYSNALVSPDWSMTGHTIVYVTRGDAQVQVVDHNGQALMNDRVNQGEMFVVPQYYTSTARAGNNGFEWVAFKTTGSPMRSPLAGYTSVIRAMPLQVITNSYQISPNQAQALKMNRGSQSFLLSPGGRRS

SEQ ID NO: 11911 - protein, 497 aa, Sesamum indicum
MALTSLLSFFIVVTLLIRGLSAQLAGEQDFYWQDLQSQQQHKLQARTDCRVERLTAQEPTIRFESEAGLTEFWDRNNQQFECAGVAAVRNVIQPRGLLLPHYNNAPQLLYVVRGRGIQGTVIPGCAETFERDTQPRQDRRRRFMDRHQKVRQFRQGDILALPAGLTLWFYNNGGEPLITVALLDTGNAANQLDQTFRHFFLAGNPQGGRQSYFGRPQTEKQQGETKNIFNGFDDEILADAFGVDVQTARRLKGQDDLRGRIVRAERLDIVLPGEEEEERWERDPYSGANGLEETLCTAKLRENLDEPARADVYNPHGGRISSLNSLTLPVLSWLRLSAEKGVLYRNGLVAPHWNLNAHSIIYITRGSGRFQVVGHTGRSVFDGVVREGQLIIVPQNYVVAKRASQDEGLEWISFKTNDNAMTSQLAGRLSAIRAMPEEVVMTAYQVSRDEARRLKYNREESRVFSSTSRYSWPRSSRPMSYMPKPFEYVLDVIKSMM

SEQ ID NO: 11912 - protein, 131 aa, Triticum aestivum
MSWQTYVDDHLCCEIDGQHLTSAAILGHDGSVWTESPNFPKFKPEEIAGIVKDFEEPGHLAPTGLFLGGTKYMVIQGEPGVVIRGKKGTGGITIKKTGMALILGIYDEPMTPGQCNLVVERLGDYLIDQGY

SEQ ID NO: 11913 - protein, 92 aa, Triticum aestivum
ISCSQVDSTLMPCLQYVQQGGSPARGCCTGIQNLLAEANNSPDRRTICGCLKNVANGASGGPYITRAAALPSKCNVALPYKISPSVDCNTVH

SEQ ID NO: 11914 - skipped

SEQ ID NO: 11915 - protein, 212 aa, Triticum aestivum
MKMMSTRALALGAAAVLAFAAATAQAQRCGEQGSNMECPNNLCCSQYGYCGMGGDYCGKGCQNGACWTSKRCGSQAGGATCTNNQCCSQYGYCGFGAEYCGAGCQGGPCRADIKCGSQAGGKLCPNNLCCSQWGFCGLGSEFCGGGCQSGACSTDKPCGKDAGGRVCTNNYCCSKWGSCGIGPGYCGAGCQSGGCDGVFAEAITANSTLLQE

SEQ ID NO: 11916 - protein, 439 aa, Triticum aestivum
MKTFIIFVLLAMAMNIASASRLLSPRGKELHTPQEQFPQQQQFPQPQQFPQQQIPQQHQIPQQPQQFPQQQQFLQQQQIPQQQIPQQHQIPQQPQQFPQQQQFPQQHQSPQQQFPQQQFPQQKLPQQEFPQQQISQQPQQLPQQQQIPQQPQQFLQQQQFPQQQPPQQHQFPQQQLPQQQQIPQQQQIPQQPQQIPQQQQIPQQPQQFPQQQFPQQQFPQQQFPQQEFPQQQQFPQQQIARQPQQLPQQQQIPQQPQQFPQQQQFPQQQSPQQQQFPQQQFPQQQQLPQKQFPQPQQIPQQQQIPQQPQQFPQQQFPQQQQFPQQQEFPQQQFPQQQFHQQQLPQQQFPQQQFPQQQFPQQQQFPQQQQLTQQQFPRPQQSPEQQQFPQQQFPQQPPQQFPQQQFPIPYPPQQSEEPSPYQQYPQQQPSGSDVISISGL

SEQ ID NO: 11917 - protein, 279 aa, Triticum aestivum
NMQVDPSSQVQWPQQQPVPQPHQPFSQQPQQTFPQPQQTFPHQPQQQFPQPQQPQQQFLQPQQPFPQQPQQPYPQQPQQPFPQTQQPQQLFPQSQQPQQQFSQPQQQFPQPQQPQQSFPQQQPPFIQPSLQQQVNPCKNFLLQQCKPVSLVSSLWSMIWPQSDCQVMRQQCCQQLAQIPQQLQCAAIHTIIHSIIMQQEQQEQQQGMHILLPLYQQQQVGQGTLVQGQGIIQPQQPAQLEAIRSLVLQTLPTMCNVYVPPECSIIKAPFSSVVAGIGGQ

SEQ ID NO: 11918 - protein, 281 aa, Triticum aestivum
VRVPVPQLQPQNPSQQQPQEQVPLVQQQQFLGQQQQHFPGQQQPFPPQQPYPQPQPFLPQLPYPQPQPFPPQQSYPQPQPQYPQPQQPISQQQAQLQQQQQQQQQQILQQILQQQLIPCRDVVLQQPNIAHASSQVSQQSYQLLQQLCCQQLWQTPEQSRCQAIHNVIHAIILHHQQQQQQQQQQQQQQQQQQQQQQQQQQQQPSSQVSYQQPQQQYPSGQGSFQPSQQNPQAQGFVQPQQLPQFEEIRNLALQTLPAMCNVYIPPYCSTTIAPFGIFSTN

SEQ ID NO: 11919 - protein, 125 aa, Triticum aestivum
MAASAATATAAAVGAGEVISVHSLEQWTMQIEEANAAKKLVVIDFTASWCGPCRIMAPIFADLAKKFPAAVFLKVDVDELKSIAEQFSVEAMPTFLFMKEGDVKDRVVGAIKEELTNKVGLHAAQ

SEQ ID NO: 11920 - protein, 848 aa, Triticum aestivum
MAKRLVLFVAVVVALVALTVAEGEASEQLQCERELQELQERELKACQQVMDQQLRDISPECHPVVVSPVAGQYEQQIVVPPKGGSFYPGETTPPQQLQQRIFWGIPALLKRYYPSVTCPQQVSYYPGQASPQRPGQGQQPGQGQQGYYPTSPQQPGQWQQPEQGQPRYYPTSPQQSGQLQQPAQGQQPGQGQQGQQPGQGQPGYYPTSSQLQPGQLQQPAQGQQGQQPGQAQQGQQPGQGQQPGQGQQGQQPGQGQQPGQGQQGQQLGQGQQGYYPTSLQQSGQGQPGYYPTSLQQLGQGQSGYYPTSPQQPGQGQQPGQLQQPAQGQQPGQGQQGQQPGQGQQGQQPGQGQQPGQGQPGYYPTSPQQSGQGQPGYYPTSSQQPTQSQQPGQGQQGQQVGQGQQAQQPGQGQQPGQGQPGYYPTSPQQSGQGQPGYYLTSPQQSGQGQQPGQLQQSAQGQKGQQPGQGQQPGQGQQGQQPGQGQQGQQPGQGQPGYYPTSPQQSGQGQQPGQWQQPGQGQPGYYPTSPLQPGQGQPGYDPTSPQQPGQGQQPGQLQQPAQGQQGQQLAQGQQGQQPAQVQQGQRPAQGQQGQQPGQGQQGQQLGQGQQGQQPGQGQQGQQPAQGQQGQQPGQGQQGQQPGQGQQGQQPGQGQQPGQGQPWYYPTSPQESGQGQQPGQWQQPGQGQPGYYLTSPLQLGQGQQGYYPTSLQQPGQGQQPGQWQQSGQGQHWYYPTSPQLSGQGQRPGQWLQPGQGQQGYYPTSPQQPGQGQQLGQWLQPGQGQQGYYPTSLQQTGQGQQSGQGQQGYYSSYHVSVEHQAASLKVAKAQQLAAQLPAMCRLEGGDALSASQ

SEQ ID NO: 11921 - protein, 203 aa, Triticum aestivum
GDVATGRGSEKVHVAIYYESLCPYSVRFVANHLFKAYRDGLLDAANLTLVPYGNAVVRNDGTISCQHGPEECLLNTVEACAIDAWPDVKVHLGFIYCVSDLVLKNKHREWESCFQKQGLDPKPVTECYKGERGHNLSLEYGRQTAELVPPHQFVPWVVVDGKPLYNDYGNFKAYICKAYKGYPLLEACRSLGLEAHDDVYGRL

SEQ ID NO: 11922 - protein, 119 aa, Triticum aestivum
CYPGQAFQVPALPACRPLLRLQCNGSQVPEAVLRDCCQQLAHISEWCRCGALYSMLDSMYKEHGAQEGQAGTGAFPRCRREVVKLTAASITAVCRLPIVVDASGDGAYVCKDVAAYPDA

SEQ ID NO: 11923 - protein, 369 aa, Triticum aestivum
MKTFLIFALLAIVATSAIAQMENSHIPGLERPSQQQPLPPQQTLSHHQQQQPIQQQPQPFSQQQPCSQQQQQPLSQQQQPPFSQQQPPFSQQQQQPLSQQQQPPFSQQQPPFSQQQQPPFSQQQPPFSQQQQPVLPQQPSFSQQQLPPFSQQQSPFSQQQQIVLQQQPPFLQQQQPSLPQQPPFSQQQQQLVLPQQQIPFVHPSILQQLNPCKVFLQQQCSPVAMPQSLARSQMLQQSSCHVMQQQCCQQLPQIPQQSRYEAIRAIIYSIILQEQQQVQGSIQTPQQQPQQLGQCVSQPQQQSQQQLGQQPQQQQLAQGTFLQPHQIAQLEVMTSIALRTLPTMCRVNVPLYRTTTSVPFGVGTGVGSY

SEQ ID NO: 11924 - protein, 137 aa, Triticum aestivum
MGSKGFKGVIVCLLILGLVLEQLQVEGKSCCRSTLGRNCYNLCRARGAQKLCAGVCRCKISSGLSCPKGFPKLALESNSDEPDTIEYCNLGCRSSVCDYMVNAAADDEEMKLYVENCADACVSFCNGDAGLPSLDAY

SEQ ID NO: 11925 - protein, 60 aa, Triticum aestivum
EMGDGQLCVICLRKRRRAAFVPCGHLVCCCNCAKRVELMDEPLCPVCRQDIQYMLRVYDS

SEQ ID NO: 11926 - protein, 76 aa, Triticum aestivum
EFTNTCMECLVCDVHVACGDFASNDVIDPAKFRRLGINDCLVNDGKSIEPSFPVSFQYGNSFPYPMTVASASCDCN

SEQ ID NO: 11927 - protein, 108 aa, Triticum aestivum
MTLVASSSLDPVWVEVLGDPLLRRLLLRFIFCRATLSLFKASNDKAECLPSCVPPLPESVGGESMLSQCCVMRVASFLGAADQFSFAEVTTWPDIDEPTSSGGVDKEL

SEQ ID NO: 11928 - protein, 107 aa, Triticum aestivum
MAKLMCLCFIILTIAVVVSADECEGDRQEMIKQCAKYQQWPANPKVNPSDACCAVWQKANIPCLCAGVTKEKEKIWCMEKVAYVANFCKKPFPHGYKCGSYTFPPLA

SEQ ID NO: 11929 - protein, 89 aa, Triticum aestivum
MGKRKAAAKPPPRKGMDKLDTVFSCPFCNHGSSVECRIDLKNLIGEANCQICQESFSTTANALTEAIDVYSEWIDECERVNTVEGDDGA

SEQ ID NO: 11930 - protein, 284 aa, Litopenaeus vannamei; identical to SEQ ID NO: 11807

SEQ ID NO: 11931 - protein, 356 aa, Litopenaeus vannamei
MADAAVIEKLEAGFKKLEAATDCKSLLKKYLTKEVFDKLKDKRTSLGATLLDVIQSGVENLDSGVGIYAPDAEAYTLFAPLFDPIIEDYHVGFKQTDKHPNKDFGDVNSFVNVDPEGKFVISTRVRCGRSLQGYPFNPCLTESQYKEMEAKVSSTLSSLEGELKGTYYPLTGMSKEVQQKLIDDHFLFKEGDRFLQAANACRYWPAGRGIYHNDNKTFLVWVNEEDHLRIISMQMGGDLGQVFRRLTSAVNEIEKRIPFSHHDRLGFLTFCPTNLGTTVRASVHIKLPKLAANREKLEEVAGKYNLQVRGTRGEHTEAEGGIYDISNKRRMGLTEFQAVKEMQDGILELIKIEKEM

SEQ ID NO: 11932 - protein, 177 aa, Litopenaeus vannamei
MSRKSGSRSSSKRSKKSGGGSNVFDMFTQRQVAEFKEGFQLMDRDKDGVIGKTDLRGTFDEIGRIATDQELDEMLADAPAPINFTMLLNMFAERQTGESDDDDVVAKAFLAFADEEGNIDCDTFRHALMTWGDKFSSQEADDALDQMDIDDGGKIDVQGVIQMLTAGGGDDAAAEEA

SEQ ID NO: 11933 - protein, 193 aa, Litopenaeus vannamei
MAYSWDNRVKYVVRYMYDIDNNGFLDKNDFECLAVRNTLIEGRGEFSADAYANNQKIMRNLWNEIAELADFNKDGEVTVDEFKQAVQKHCQGKKYGDFPGAFKVFIANQFKAIDVNGDGKVGLDEYRLDCITRSAFAEVKEIDDAYNKLTTEDDRKAGGLTLERYQDLYAQFISNPDESCSACYLFGPLKVVQ

SEQ ID NO: 11934 - protein, 284 aa, Crangon crangon; identical to SEQ ID NO: 11776

SEQ ID NO: 11935 - protein, 356 aa, Crangon crangon
MVDAEVLEKLEAGYKKLEAATDCKSLLKKYLTKEVFDELKTKKTALGATLLDVIQSGVENLDSGVGIYAPDAEAYTLFAPLFDPIIEDYHVGFKQSDKHPGKDFGDLEKFVNVDPEGTFVVSTRVRCGRSMEGYPFNPCLTEAQYKEMESKVSSTLSSLEGELKGTYYPLTGMSKDVQQKLIDDHFLFKEGDRFLQAANACRYWPAGRGIYHNDNKTFLVWVNEEDHLRIISMQMGGDLGQVFRRLTSAVNEIEKRIPFSHHDRLGFLTFCPTNLGTTVRASVHIKLPKLAANRDKLESVAGKYNLQVRGTRGEHTEAEGGIYDISNKRRMGLTEFQAVKEMQDGILEPIKMEKEM

SEQ ID NO: 11936 - protein, 193 aa, Crangon crangon
MAYTWDNRVKYVVRYMYDIDNNGFLDKNDFECLAVKNTLIECRGEWSAEKYAANQKIMSNLWNEIAELADFNKDGEVTVEEFKQAVQKHCNGKPFGDFPSAFKTFIANQFKTIDVNGDGLVGVDEYRLDCISRSAFSCIKEIDDAYNLLCTEEDKKAGGINIARYQELYAQFISNPDEKCNAVYLFGPLKEVV

SEQ ID NO: 11937 - protein, 153 aa, Crangon crangon
MAADLSARDVERVKFAFSIYDFEGNGQIDAFYIGDCLRALNLNPTLALIAKLGGTEKRKEKMIKLDDFMPLFAQVKKDKDAGSYEDFIEVLKLYDKAENGTMMYAELEHILLSLGERLDKAELEPILRECCPPEDDEGLIPFEPFVKKLTQLL

SEQ ID NO: 11938 - protein, 150 aa, Crangon crangon
MDSLEPDQIDALKKAFDSFDTENQGFITADTVATILRMMGVKISDKNLAEVIAETDEDGSGQLEFEEFVDLSSKFLIEEDEEALKAELREAFRIYDKEGQGFITTDVLKEILTEIDNKLTPEDLDGIIEEVDEDGSGTLDFDEFMEMMSG

SEQ ID NO: 11939 - protein, 249 aa, Crangon crangon
MSGSRKFFVGGNWKMNGDKAAIDGIVDFMKKGPLNPNTEVVVGCPQCYLSYTREKLPAEIGVAAQNCYKVAKGAFTGEISPAMVKDCGCEWVILGHSERRNVFNEPDQLISEKVGHALEAGLKVIPCIGEKLDERESNRTEEVVFAQMKALVPNISDWSRVVIAYEPVWAIGTGKTASPEQAQDVHAKLRQWLTENVSAEVAESCRIIYGGSVSPSNCAELAKMGDIDGFLVGGASLKPDFVTIINARG

SEQ ID NO: 11940 - protein, 109 aa, Salmo salar
MACAHLCKEADIKTALEACKAADTFSFKTFFHTIGFASKSADDVKKAFKVIDQDASGFIEVEELKLFLQNFCPKARELTDAETKAFLKAGDADGDGMIGIDEFAVLVKQ

SEQ ID NO: 11941 - protein, 434 aa, Salmo salar
MSITKIHAREILDSRGNPTVEVDLYTAKGRFRAAVPSGASTGVHEALELRDGDKSRYLGKGTVKAVDHVNKDIAAKLIEKKFSVVDQEKIDHFMLELDGTENKSKFGANAILGVSLAVCKAGAAEKGVPLYRHIADLAGHKDVILPCPAFNVINGGSHAGNKLAMQEFMILPIGASNFHEAMRIGAEVYHNLKNVIKAKYGKDATNVGDEGGFAPNILENNEALELLKTAIEKAGYPDKIIIGMDVAASEFYKAGKYDLDFKSPDDPARYITGDQLGDLYKSFIKGYPVQSIEDPFDQDDWAAWTKFTAAVDIQVVGDDLTVTNPKRIQQAVEKKACNCLLLKVNQIGSVTESIKACKLAQSNGWGVMVSHRSGETEDTFIADLVVGLCTGQIKTGAPCRSERLAKYNQLMRIEEELGAKAKFAGKDYRHPKIN

SEQ ID NO: 11942 - protein, 363 aa, Salmo salar
MPHAFPFLTPDQKKELSDIALKIVAKGKGILAADESTGSVAKRFQSINTENTEENRRLYRQLLFTADDRAGPCIGGVIFFHETLYQKTDAGKTFPEHVKSRGWVVGIKVDKGVVPLAGTNGETTTQGLDGLYERCAQYKKDGCDFAKWRCVLKITSTTPSRLAIMENCNVLARYASICQMHGIVPIVEPEILPDGDHDLKRTQYVTEKVLAAMYKALSDHHVYLEGTLLKPNMVTAGHSCSHKYTHQEIAMATVTALRRTVPPAVPGVTFLSGGQSEEEASINLNVMNQCPLHRPWALTFSYGRALQASALKAWGGKPGNGKAAQEEFIKRALANSLACQGKYVASGDSAAAGDSLFVANHAY

SEQ ID NO: 11943 - protein, 284 aa, Salmo salar; identical to SEQ ID NO: 11829

SEQ ID NO: 11944 - protein, 1449 aa, Salmo salar
MFSFVDIRLALLLSATVLLARGQGEDDRTAGSCTLDGQFYNDRDVWKPEPCQICVCDSGTVMCDEVICEDTSDCPNPVIPHDECCPICPDDGFQEPKVEGPQGDRGAKGEPGPAGFPGNDGIPGQPGLPGPPGPPGPPGLGGNFSPQMSGGFDEKSGGGMSMPGPMGPMGPRGPPGPPGSSGPQGFTGPPGEPGEAGSSGPMGPRGPAGPPGKNGDDGESGKPGRPGERGASGPQGARGFPGTPGLPGIKGHRGFSGLDGAKGESGPAGPKGEAGASGENGAAGAMGPRGLPGERGRAGPNGAAGARGNDGAAGAAGPPGPTGPAGAPGFPGGPGAKGEVGAQGARGGEGPQGSRGEAGNPGPAGAAGPAGNNGADGNPGTKGAPGSSGIAGAPGFPGPRGPPGPQGAGGAPGPKGNTGEVGATGAKGEAGAKGESGPAGVQGPAGPAGEEGKRGGRGEPGSAGARGAPGERGAPGSRGFPGSDGAAGPKGGPGERGGAGVAGAKGNTGEPGRNGEPGMPGSKGMTGSPGSPGPDGKTGPSGAGGQDGRPGPPGPVGARGQPGVMGFPGPKGAAGEGGKPGERGVMGPVGAVGAPGKDGDVGAPGAPGAAGPSGERGEQGAGGPPGFQGLPGPQGAIGETGKPGEQGLPGEGGAPGAAGSRGDRGFPGERGAPGPSGPAGARGSPGSAGNDGAKGEAGAAGAPGGQGPPGLQGMPGERGAGGLPGLKGDRGDQGVKGADGAGGKDGIRGMTGPIGPNGPAGSPGDKGETGAPGPGGPTGARGAPGERGESGAPGPAGFAGPPGGDGQPGAKGEAGDNGAKGDGGAQGPAGPTGAPGPQGPAGNTGAKGARGAAGPPGATGFPGAAGRVGPPGPSGNNGPPGPPGPGGKEGQKGNRGETGPSGRPGELGAAGPPGAQGEKGQPGADGPNGPAGTPGPQGIGGQRGIVGLPGQRGERGFPGLPGQLGEPGKQGPGGPSGERGPPGPMGPPGLAGAPGESGREGTPGNEGSSGRDGAAGPKGERGESGAAGASGAPGPPGAPGPVGPAGKSGDRGESGPAGPAGIAGPAGPRGPSGPAGARGDKGEAGEAGERGMKGHRGFTGMQGPSGPAGPSGESGPAGASGPAGPRGPSGSAGAAGKDGMSGLPGPIGPPGPRGRSGEMGPSGPPGPPGPPGPPGPPGGGFDMGFIAQPAQEKAPDPFRHFRADDANVMRDRDLEVDTTLKSLSQQIENIRSPEGTKKNPARTCRDLKMCHPDWKSGEYWIDPDQGCTQDAIKVYCNMETGETCVYPTEAEIPKKSWYTSKNIKEKKHVWFGEAMTDGFQFEYGSEGSSAQDVNIQLTFLRLMATEASQNITYHCKNSIAYMDQQSGNLKKSLLLQGSNEIEIRAEGNSRFTYSVTEDGCTSHTGAWGKTVIDYKTTKTSRLPIIDIAPMDVGAPNQEFGIEVGPVCFL

SEQ ID NO: 11945 - protein, 381 aa, Salmo salar
MPFGNTHNNFKLNFKVEEEYPDLTKHNNHMAKVLTKDMYAKLRDKQTPSGFTLDDVIQTGVDNPGHPFIMTVGCVAGDEESYEIFKDLLDPIISDRHSGYKPTDKHKTDLNFENLKGGDDLDPNYVLSSRVRTGRSIKGYTLPPHNSRGERRAVEKLSVEALNTLDGEFKGKYYPLNKMTDAEQEQLIADHFLFDKPVSPLLLGAGMARDWPDARGIWHNDAKSFLVWVNEEDHLRVISMEKGGNMKEVFRRFCVGLKRIEETFKKHNHGFMWNEHLGYVLTCPSNLGTGLRGGVHVKLPKLSTHPKFEEILTRLRLQKRGTGGVDTASVGGVFDISNADRLGSSEVDQVQMVVDGVKLMVEMEKKLEKGEAIDGMIPAQK

SEQ ID NO: 11946 - protein, 247 aa, Salmo salar
MSRKFFVGGNWKMNGDKASLGELIKTLNSAKLDPNTEVVCGAPSIYLEFARSKLDPKIGVAAQNCYKVKGGAFTGEISPAMIKDVGVHWVILGHSERRWVFGETDELIGQKCAHALENGLGVIACIGEKLDEREAGITEKVINAQTKHFADNIKDWSKVVLAYEPVWAIGTGKTASPAQAQDVHDKLRQWVKANVSEAVANSVRIIYGGSVTGGTCKELGGMKDVDGFLVGGAALKPEFVDIINAKQ

SEQ ID NO: 11947 - skipped

SEQ ID NO: 11948 - protein, 109 aa, Gadus morhua
MAFAGILADADCAAAVKACEAAESFSYKAFFAKCGLSGKSADDIKKAFFVIDQDKSGFIEEDELKLFLQVFKAGARALTDAETKAFLKAGDSDGDGAIGVDEWAVLVKA

SEQ ID NO: 11949 - protein, 11 aa, Gadus morhua
SITKIKAREIL

SEQ ID NO: 11950 - protein, 15 aa, Gadus morhua
PHAYPFLSPEQKKEL

SEQ ID NO: 11951 - protein, 210 aa, Gallus gallus
MAMAGVFVLFSFVLCGFLPDAAFGAEVDCSRFPNATDKEGKDVLVCNKDLRPICGTDGVTYTNDCLLCAYSIEFGTNISKEHDGECKETVPMNCSSYANTTSEDGKVMVLCNRAFNPVCGTDGVTYDNECLLCAHKVEQGASVDKRHDGGCRKELAAVSVDCSEYPKPDCTAEDRPLCGSDNKTYGNKCNFCNAVVESNGTLTLSHFGKC

SEQ ID NO: 11952 - protein, 386 aa, Gallus gallus
MGSIGAASMEFCFDVFKELKVHHANENIFYCPIAIMSALAMVYLGAKDSTRTQINKVVRFDKLPGFGDSIEAQCGTSVNVHSSLRDILNQITKPNDVYSFSLASRLYAEERYPILPEYLQCVKELYRGGLEPINFQTAADQARELINSWVESQTNGIIRNVLQPSSVDSQTAMVLVNAIVFKGLWEKTFKDEDTQAMPFRVTEQESKPVQMMYQIGLFRVASMASEKMKILELPFASGTMSMLVLLPDEVSGLEQLESIINFEKLTEWTSSNVMEERKIKVYLPRMKMEEKYNLTSVLMAMGITDVFSSSANLSGISSAESLKISQAVHAAHAEINEAGREVVGSAEAGVDAASVSEEFRADHPFLFCIKHIATNAVLFFGRCVSP

SEQ ID NO: 11953 - protein, 705 aa, Gallus gallus
MKLILCTVLSLGIAAVCFAAPPKSVIRWCTISSPEEKKCNNLRDLTQQERISLTCVQKATYLDCIKAIANNEADAISLDGGQVFEAGLAPYKLKPIAAEIYEHTEGSTTSYYAVAVVKKGTEFTVNDLQGKNSCHTGLGRSAGWNIPIGTLLHWGAIEWEGIESGSVEQAVAKFFSASCVPGATIEQKLCRQCKGDPKTKCARNAPYSGYSGAFHCLKDGKGDVAFVKHTTVNENAPDLNDEYELLCLDGSRQPVDNYKTCNWARVAAHAVVARDDNKVEDIWSFLSKAQSDFGVDTKSDFHLFGPPGKKDPVLKDFLFKDSAIMLKRVPSLMDSQLYLGFEYYSAIQSMRKDQLTPSPRENRIQWCAVGKDEKSKCDRWSVVSNGDVECTVVDETKDCIIKIMKGEADAVALDGGLVYTAGVCGLVPVMAERYDDESQCSKTDERPASYFAVAVARKDSNVNWNNLKGKKSCHTAVGRTAGWVIPMGLIHNRTGTCNFDEYFSEGCAPGSPPNSRLCQLCQGSGGIPPEKCVASSHEKYFGYTGALRCLVEKGDVAFIQHSTVEENTGGKNKADWAKNLQMDDFELLCTDGRRANVMDYRECNLAEVPTHAVVVRPEKANKIRDLLERQEKRFGVNGSEKSKFMMFESQNKDLLFKDLTKCLFKVREGTTYKEFLGDKFYTVISNLKTCNPSDILQMCSFLEGK

SEQ ID NO: 11954 - protein, 147 aa, Gallus gallus
MRSLLILVLCFLPLAALGKVFGRCELAAAMKRHGLDNYRGYSLGNWVCVAKFESNFNTQATNRNTDGSTDYGILQINSRWWCNDGRTPGSRNLCNIPCSALLSSDITASVNCAKKIVSDGNGMSAWVAWRNRCKGTDVQAWIRGCRL

SEQ ID NO: 11955 - protein, 615 aa, Gallus gallus
MKWVTLISFIFLFSSATSRNLQRFARDAEHKSEIAHRYNDLKEETFKAVAMITFAQYLQRCSYEGLSKLVKDVVDLAQKCVANEDAPECSKPLPSIILDEICQVEKLRDSYGAMADCCSKADPERNECFLSFKVSQPDFVQPYQRPASDVICQEYQDNRVSFLGHFIYSVARRHPFLYAPAILSFAVDFEHALQSCCKESDVGACLDTKEIVMREKAKGVSVKQQYFCGILKQFGDRVFQARQLIYLSQKYPKAPFSEVSKFVHDSIGVHKECCEGDMVECMDDMARMMSNLCSQQDVFSGKIKDCCEKPIVERSQCIMEAEFDEKPADLPSLVEKYIEDKEVCKSFEAGHDAFMAEFVYEYSRRHPEFSIQLIMRIAKGYESLLEKCCKTDNPAECYANAQEQLNQHIKETQDVVKTNCDLLHDHGEADFLKSILIRYTKKMPQVPTDLLLETGKKMTTIGTKCCQLGEDRRMACSEGYLSIVIHDTCRKQETTPINDNVSQCCSQLYANRRPCFTAMGVDTKYVPPPFNPDMFSFDEKLCSAPAEEREVGQMKLLINLIKRKPQMTEEQIKTIADGFTAMVDKCCKQSDINTCFGEEGANLIVQSRATLGIGA

SEQ ID NO: 11956 - protein, 1912 aa, Gallus gallus
MRGLISALVLTLVGSQHLNYQPDFGENKVYTYNYESILFSGIPEKGLARTGIRIRSEVEISGIGPKLCLIRIHSIEAAEYNGIWPTSSFSRSLKLTQALTGQLSIPIKFEYSNGHVGNLMAPDSVSDDGLNIYRGILNILELSLKKMQHSYSIQEAGIGGICNTTYAIQENKKANLVDVTKSKDLNSCEEKVQVVTGSAYTQPCQTCQQRNKNSRATATYNYKIKYTHNEAVITQAEVEEVHQFTPFHEITGGNAIVEARQKLALIEVQKQVAEVPPKEFQKRGSLQYQFGSELLQLPVHLFKIKDVERQIEERLQDLVETTYEQLPSDAPAKALKLMHLLRAANEENYESVWKQFSSRPAYRRYLLDLLPAAASHRSLRFLRHKMERQELTNWEIAQTVLVALHSSSPTQEVMEEATLIVKKHCPRSSSVLRKVCLLSYASLCHKRCSSPYSCSECLQVFHVFAGEALGKSNIEEVLLALKALGNVGHPASIKHIKKFLPGYAAGASELPLKVHETAVMALKSIGMRDPQMVQAITLEIFLNHKIHPRIRMLAAVVLLETKPGLPILMILVDAVLKEPSMQVASFIYSHLRALGRSTAPDLQMMASACRMAVRALSPKFDRSGYQFSKVFRFSMFKEFLMSGLAAKYFVLNNAGSLIPTMAVSQLRTHFLGRVADPIEVGIAAEGLQEMFVRGYSPDKDWETNYDFREILKKLSDWKALPRDKPFASGYLKMFGQELLFGRLDKDTLQNVLQVWYGPDEKIPSIRRLISSLQTGIGRQWTKALLLSEIRCIVPTCVGFPMETSFYYSSVTKVAGNVQAQITPSPRSDFRLTELLNSNVRLRSKMSLSMAKHMTFVIGINTNMIQAGLEAHTKVNAHVPVNVVATIQMKEKSIKAEIPPCKEETNLIIVSSKTFAVTRNIEDLAASKMTPVLLPEAVPDIMKMSFDSDSASGETDNIRDRQSVEDVSSGNSFSFGHPSSGKEPFIQSMCSNASTFGVQVCIEKKSVHAAFIRNVPLYNAIGEHALRMSFKPVYSDVPIEKIQVTIQAGDQAPTKMVRLVTFEDPERQESSRKEVMKRVKKILDDTDNQATRNSRSSSSSASSISESSESTTSTPSSSDSDNRASQGDPQINLKSRQSKANEKKFYPFGDSSSSGSSSSSSSSSSSSSDSSSSSRSSSSSDSSSSSSSSSSSSSSKSKSSSRSSKSNRSSSSSNSKDSSSSSSKSNSKGSSSSSSKASGTRQKAKKQSKTTSFPHASAAEGERSVHEQKQETQSSSSSSSRASSNSRSTSSSTSSSSESSGVSHRQWKQDREAETKRVKSQFNSHSSYDIPNEWETYLPKVYRLRFRSAHTHWHSGHRTSSSSSSSSSESGSSHSNSSSSDSSSRRSHMSDSSSSSSSHRHGEKAAHSSRRSPTSRAASAHHRPGSSLTRERNFLGDVIPPGITIVAQAVRSDNRNQGYQATAYVRSDAAKVDVQLVVVQLAETNWKACADAVILPLKAQARMRWGKECRDYRIAALATTGQMARKLAVQLKVQWGIIPSWIKKTSTALMRYVPGVALVLGFSEAHQRNPSRELIVRAVATSPRSIDTVIKVPGVTLYYQGLRVPFTLALGASSSSYETRDITAWNFLPEIASQIAQEDQSTCEVSKGDFKTFDRMSFTCSFNKSCNVVVAQDCTEHPKFIITTRKVDHQSLSREVHINTSSANITICPAADSSLLVTCNKESVLSDSGVSEYEKDNIKIYKNGKTVIVEAPIHGLKNVNFDGEILKVTVASWMRGKTCGVCGNNDREKHNELLMPNHKLAHSCSAFVHSWVLLEETCSGGCKLQRRYVKLNRNPTIDGEESTCYSVDPVLKCMKDCTPIEKTSVKVGFHCFPKATAVSLLEWQRSSDKKSASEDVVESVDADIDCTCTGDCS

SEQ ID NO: 11957 - skipped

SEQ ID NO: 11958 - protein, 110 aa, Gallus gallus
MAMTDVLSAEDIKKAVGAFSAAESFNYKKFFEMVGLKKKSPEDVKKVFHILDKDRSGFIEEEELKFVLKGFTPDGRDLSDKETKALLAAGDKDGDGKIGADEFATMVAES

SEQ ID NO: 11959 - protein, 434 aa, Gallus gallus
MSIQKIHAREILDSRGEPTVEVDLHTAKGHFRAAVPSGASTGIHEALEPRDGDKKRFLGKGVLKAVEHINKTIGPALIEKKISVVEQEKIDKVMIEMDGTENKSKFGANAILGVSLAVCKAGAAEKGVPLYRHIADLAGNTELILPVPAFNVINGGSHAGNKLAMQEFMVLPVGAASFHDAMRVGAEVYHSLKGVIKAKYGKDATNVGGEGGFAPNILDNHEALELLKAAIAQAGYTDKVVIGMDVAASEFCRDGRYHLDFKSPPHTKRYITGEQLGEIYRGFIKDYPVVSIEDPFDQDDWEAWKRFVFHVDIQVVGDDLTVTNPKRIAHGAEQHACNCLLLKVNQIGSVTESIQACKLAQSHGWGVMVSHRSGETEDTFIADLVVGLCTGQIKTGAPCRSERLAKYNQLMRIEEALGDKAKFAGRKFRNPKAK

SEQ ID NO: 11960 - skipped

SEQ ID NO: 11961 - protein, 172 aa, Bos taurus
MKAVFLTLLFGLVCTAQETPAEIDPSKIPGEWRIIYAAADNKDKIVEGGPLRNYYRRIECINDCESLSITFYLKDQGTCLLLTEVAKRQEGYVYVLEFYGTNTLEVIHVSENMLVTYVENYDGERITKMTEGLAKGTSFTPEELEKYQQLNSERGVPNENIENLIKTDNCPP

SEQ ID NO: 11962 - protein, 101 aa, Bos taurus
MSSSQLEQAITDLINLFHKYSGSDDTIEKEDLLRLMKDNFPNFLGACEKRGRDYLSNIFEKQDKNKDRKIDFSEFLSLLADIATDYHNHSHGAQLCSGGNQ

SEQ ID NO: 11963 - protein, 142 aa, Bos taurus
MMSFVSLLLVGILFHATQAEQLTKCEVFRELKDLKGYGGVSLPEWVCTTFHTSGYDTQAIVQNNDSTEYGLFQINNKIWCKDDQNPHSSNICNISCDKFLDDDLTDDIMCVKKILDKVGINYWLAHKALCSEKLDQWLCEKL

SEQ ID NO: 11964 - protein, 178 aa, Bos taurus
MKCLLLALALTCGAQALIVTQTMKGLDIQKVAGTWYSLAMAASDISLLDAQSAPLRVYVEELKPTPEGDLEILLQKWENDECAQKKIIAEKTKIPAVFKIDALNENKVLVLDTDYKKYLLVCMENSAEPEQSLVCQCLVRTPEVDDEALEKFDKALKALPMHIRLSFNPTQLEEQCHI

SEQ ID NO: 11965 - protein, 607 aa, Bos taurus
MKWVTFISLLLLFSSAYSRGVFRRDTHKSEIAHRFKDLGEEHFKGLVLIAFSQYLQQCPFDEHVKLVNELTEFAKTCVADESHAGCEKSLHTLFGDELCKVASLRETYGDMADCCEKQEPERNECFLSHKDDSPDLPKLKPDPNTLCDEFKADEKKFWGKYLYEIARRHPYFYAPELLYYANKYNGVFQECCQAEDKGACLLPKIETMREKVLASSARQRLRCASIQKFGERALKAWSVARLSQKFPKAEFVEVTKLVTDLTKVHKECCHGDLLECADDRADLAKYICDNQDTISSKLKECCDKPLLEKSHCIAEVEKDAIPENLPPLTADFAEDKDVCKNYQEAKDAFLGSFLYEYSRRHPEYAVSVLLRLAKEYEATLEECCAKDDPHACYSTVFDKLKHLVDEPQNLIKQNCDQFEKLGEYGFQNALIVRYTRKVPQVSTPTLVEVSRSLGKVGTRCCTKPESERMPCTEDYLSLILNRLCVLHEKTPVSEKVTKCCTESLVNRRPCFSALTPDETYVPKAFDEKLFTFHADICTLPDTEKQIKKQTALVELLKHKPKATEEQLKTVMENFVAFVDKCCAADDKEACFAVEGPKLVVSTQTALA

SEQ ID NO: 11966 - skipped

SEQ ID NO: 11967 - protein, 15 aa, Corylus avellana
HWNLNAHSVVYAIRG

SEQ ID NO: 11968 - protein, 15 aa, Juglans regia
HTLPVLRWLQLSAER

SEQ ID NO: 11969 - protein, 15 aa, Juglans regia
AGVAHWSYNDGSNPV

SEQ ID NO: 11970 - protein, 15 aa, Juglans regia
VPHWNLNAHSVVYAL

SEQ ID NO: 11971 - protein, 14 aa, Juglans regia
HWNLNAHSVVYALR

SEQ ID NO: 11972 - protein, 14 aa, Juglans regia
VPHWNLNAHSVVYA

SEQ ID NO: 11973 - protein, 14 aa, Juglans regia
HTLPVLRWLQLSAE

SEQ ID NO: 11974 - protein, 14 aa, Juglans regia
DIIAFPAGVAHWSY

SEQ ID NO: 11975 - protein, 14 aa, Juglans regia
LLLPQYSNAPQLVY

SEQ ID NO: 11976 - protein, 14 aa, Carya illinoensis
HWNLNAHSVVYALR

SEQ ID NO: 11977 - protein, 14 aa, Carya illinoensis
AGVAHWCYNDGSSP

SEQ ID NO: 11978 - protein, 14 aa, Carya illinoensis
LPILRWLQLSAERG

SEQ ID NO: 11979 - protein, 14 aa, Carya illinoensis
DIIAFPAGVAHWCY

SEQ ID NO: 11980 - protein, 14 aa, Carya illinoensis
PAGVAHWCYNDGSS

SEQ ID NO: 11981 - protein, 14 aa, Corylus avellana
HWNLNAHSVVYAIR

SEQ ID NO: 11982 - protein, 14 aa, Corylus avellana
GDIIALPAGVAHWC

SEQ ID NO: 11983 - protein, 14 aa, Corylus avellana
PAGVAHWCYNDGDS

SEQ ID NO: 11984 - protein, 14 aa, Corylus avellana
LLLPQYSNAPELIY

SEQ ID NO: 11985 - protein, 14 aa, Corylus avellana
FREGDIIALPAGVA

SEQ ID NO: 11986 - protein, 14 aa, Corylus avellana
AGRTSAIRALPDDV

SEQ ID NO: 11987 - protein, 14 aa, Vigna radiata
FGINAENNQRNFLA

SEQ ID NO: 11988 - protein, 14 aa, Vigna radiata
GSLLLPHYNSKAIV

SEQ ID NO: 11989 - protein, 14 aa, Vigna radiata
GINAENNQRNFLAG

SEQ ID NO: 11990 - protein, 14 aa, Vigna radiata
SLLLPHYNSKAIVI

SEQ ID NO: 11991 - protein, 14 aa, Vigna radiata
QRNFLAGEKDNVIS

SEQ ID NO: 11992 - protein, 14 aa, Arachis hypogaea
HYNTNAHSIIYALR

SEQ ID NO: 11993 - protein, 14 aa, Arachis hypogaea
LLILRWLGLSAEYG

SEQ ID NO: 11994 - protein, 14 aa, Arachis hypogaea
GHVLVVPQNFAVAG

SEQ ID NO: 11995 - protein, 14 aa, Arachis hypogaea
AHSIIYALRGRAHV

SEQ ID NO: 11996 - protein, 14 aa, Arachis hypogaea
ALRGRAHVQVVDSN

SEQ ID NO: 11997 - protein, 14 aa, Anacardium occidentale
AGVAHWCYNEGNSP

SEQ ID NO: 11998 - protein, 14 aa, Anacardium occidentale
HWNLNSHSIIYGCK

SEQ ID NO: 11999 - protein, 14 aa, Anacardium occidentale
GDIIAIPAGVAHWC

SEQ ID NO: 12000 - protein, 14 aa, Anacardium occidentale
LLLPQYSNAPQLIY

SEQ ID NO: 12001 - protein, 14 aa, Anacardium occidentale
NGIEETICTMRLKE

SEQ ID NO: 12002 - protein, 14 aa, Fagopyrum esculentum
RINTVNSNNLPILE

SEQ ID NO: 12003 - protein, 14 aa, Fagopyrum esculentum
QILVVPQGFAVVLK

SEQ ID NO: 12004 - protein, 14 aa, Fagopyrum esculentum
PRAGRINTVNSNNL

SEQ ID NO: 12005 - protein, 14 aa, Fagopyrum esculentum
SVLRAIPVEVLANS

SEQ ID NO: 12006 - protein, 14 aa, Fagopyrum esculentum
TKLILSFSLCLMVL

SEQ ID NO: 12007 - protein, 14 aa, Bertholletia excelsa
AIPAGVALWCYNDG

SEQ ID NO: 12008 - protein, 14 aa, Bertholletia excelsa
RGILGVLMPGCPET

SEQ ID NO: 12009 - protein, 14 aa, Bertholletia excelsa
PRAGRLTTVNSLKV

What is claimed is:

1. A method of treating a subject for two or more allergies, the method comprising:
(a) identifying the subject as having a first allergy to a first allergenic protein;
(b) identifying the subject as having a second allergy to a second allergenic protein that is immunologically cross-reactive with the first allergenic protein; and
(c) administering a multiple allergen oral immunotherapy to the subject.

2. The method of claim 2, wherein identifying the subject as having the second allergy comprises assessing the presence of IgE antibodies in the subject that bind to the first allergenic protein.

3. The method of claim 1 or 2, wherein identifying the subject as having the second allergy comprises assessing the presence of a T-cell epitope within the first allergenic protein.

4. The method of any one of claims 1-3, wherein the multiple allergen oral immunotherapy does not contain the second allergenic protein.

5. The method of any one of claims 1-4, wherein identifying the subject as having the first allergy comprises evaluating the subject's clinical history of allergy.

6. The method of any one of claims 1-5, wherein identifying the subject as having the second allergy does not include evaluating the subject's clinical history of allergy.

7. The method of any one of claims 1-6, wherein the first allergy is a shrimp, cod, salmon, hen's egg, cow's milk, peanut, sesame, soy, pecan, cashew, hazelnut, walnut, pistachio, almond, or wheat allergy.

8. The method of any one of claims 1-7, wherein the multiple allergen oral immunotherapy comprises two or more of: a shrimp allergen, a cod allergen, a salmon allergen, a hen's egg allergen, a cow's milk allergen, a peanut allergen, a sesame allergen, a soy allergen, a pecan allergen, a cashew allergen, a hazelnut allergen, a walnut allergen, a pistachio allergen, an almond allergen, and a wheat allergen.

9. The method of any one of claims 1-8, wherein the multiple allergen oral immunotherapy comprises a shrimp allergen, a cod allergen, a salmon allergen, a hen's egg allergen, a cow's milk allergen, a peanut allergen, a sesame allergen, a soy allergen, a pecan allergen, a cashew allergen, a hazelnut allergen, a walnut allergen, a pistachio allergen, an almond allergen, and a wheat allergen.

10. The method of any one of claims 1-9, wherein the multiple allergen oral immunotherapy comprises one or more allergenic proteins listed in Table 2.

11. The method of any one of claims 1-10, wherein the second allergy is selected from the group consisting of: a prawn, kiwi, brazil nut, lobster, celery, coconut, crab, apple, buckwheat, clam, pear, lentil, mussel, tomato, garden pea, oyster, stone fruit (e.g., apricot, peach, cherry), yellow mustard, abalone, birch tree, mung bean, squid, alder tree, lupin, octopus, white oak tree, Korean pine, house dust mite, cockroach, and yellow fever mosquito allergy.

12. The method of any one of claims 1-11, wherein the first and/or second allergenic protein is selected from the group consisting of proteins listed in Table 4.

13. The method of any one of claims 1-12, wherein the first and/or second allergenic protein is selected from the group consisting of proteins listed in Tables 5-7 and Tables 10-12.

14. A method of treating an allergy to kiwifruit, brazil nut, coconut, buckwheat, lentil, garden pea, yellow mustard, mung bean, lupin, and/or Korean pine in a subject in need thereof, the method comprising administering to the subject a multiple allergen oral immunotherapy comprising a soybean, sesame, pistachio, pecan, hazelnut, walnut, cashew, and/or almond allergen.

15. The method of claim 14, wherein the multiple allergen oral immunotherapy does not comprise a kiwifruit, brazil nut, coconut, buckwheat, lentil, garden pea, yellow mustard, mung bean, lupin, and/or Korean pine allergen.

16. A method for treating a subject in need thereof having an allergy to an allergenic protein listed in the first column of any one of Tables 10-12, the method comprising administering to the subject a multiple allergen oral immunotherapy comprising an allergenic protein listed in the corresponding row of the second column of Tables 10-12.

17. The method of claim 16, wherein the multiple allergen oral immunotherapy does not comprise the allergenic protein listed in the first column of Tables 10-12.

18. A method for treating a subject in need thereof having an allergy to an allergenic peptide listed in the third column of any one of Tables 13-23, the method comprising administering to the subject a multiple allergen oral immunotherapy comprising an allergenic protein listed in the corresponding row of the sixth column of Tables 13-23.

19. The method of claim 18, wherein the multiple allergen oral immunotherapy does not comprise the allergenic peptide listed in the third column of Tables 13-23.

20. A method for detecting development of tolerance to and/or monitoring the efficacy of a multiple allergen oral immunotherapy in a subject being administered the multiple allergen oral immunotherapy and in need thereof, the method comprising:
(a) obtaining a biological sample from the subject;
(b) contacting the biological sample with a reference allergenic protein present in the multiple allergen oral immunotherapy and/or an other protein that is immunologically cross reactive to the reference allergenic protein;
(c) measuring an amount of IgE, IgG, or T-cells that bind to the reference allergenic protein and/or the other protein; and
(d) comparing the amount of IgE, IgG or T-cells with a previous measurement of the amount of IgE, IgG or T-cells;
wherein tolerance and/or efficacy is indicated when the amount of IgE, IgG or T-cells, is less than the previous amount of IgE, IgG or T-cells.

21. The method of claim 20, wherein the reference allergenic protein is selected from the group consisting of a shrimp allergen, a cod allergen, a salmon allergen, a hen's egg allergen, a cow's milk allergen, a peanut allergen, a sesame allergen, a soy allergen, a pecan allergen, a cashew allergen, a hazelnut allergen, a walnut allergen, a pistachio allergen, an almond allergen, and a wheat allergen.

22. The method of claim 20 or 21, wherein the reference allergenic protein is listed in Table 2.

23. The method of any one of claims 20-22, wherein the other protein is in the same protein family as the reference allergenic protein.

24. The method of claim 23, wherein the protein family is listed in Table 3.

25. The method of any one of claims 20-24, wherein the other protein is identified by the method of any one of claims 48-67, or is listed in Table 4, Tables 5-7, or Tables 10-12.

26. The method of any one of claims 20-25, wherein the reference allergenic protein and/or the other protein are coupled to a solid support to form one or more protein-solid support complexes.

27. The method of claim 26, wherein the solid support is a membrane, a filter, a chip, a slide (such as a microscopic slide), an array (such as a microarray), a wafer, a fiber, a magnetic or a non-magnetic bead, a gel, a tubing, a plate (such as a microtiter plate), a microtiter strip, a polymer, a microparticle, a sphere, a microsphere, a nanosphere, a particle, a microparticle, a nanoparticle, or a capillary.

28. The method of claim 26 or 27, wherein the protein-solid support complexes are bound to a labeling reagent.

29. A method for detecting development of tolerance to a protein listed in the second column of any one of Tables 10-12, and/or monitoring the efficacy of a multiple allergen oral immunotherapy in treating an allergy to a protein listed in the second column of any one of Tables 10-12, the method comprising:
(a) obtaining a biological sample from the subject;
(b) contacting the biological sample with a protein listed in the corresponding row of the first column of Tables 10-12;
(c) measuring an amount of IgE, IgG, or T-cells that bind to the protein listed in the corresponding row of the first column of Tables 10-12; and
(d) comparing the amount of IgE, IgG or T-cells with a previous measurement of the amount of IgE, IgG or T-cells;
wherein tolerance and/or efficacy is indicated when the amount of IgE, IgG or T-cells, is less than the previous amount of IgE, IgG or T-cells.

30. A method for detecting development of tolerance to a peptide listed in the third column of any one of Tables 13-23, and/or monitoring the efficacy of a multiple allergen oral immunotherapy in treating an allergy to a peptide listed in the third column of any one of Tables 13-23, the method comprising:
(a) obtaining a biological sample from the subject;
(b) contacting the biological sample with a protein listed in the corresponding row of the sixth column of Tables 13-23;
(c) measuring an amount of IgE, IgG, or T-cells that bind to the protein listed in the corresponding row of the sixth column of Tables 13-23; and
(d) comparing the amount of IgE, IgG or T-cells with a previous measurement of the amount of IgE, IgG or T-cells;
wherein tolerance and/or efficacy is indicated when the amount of IgE, IgG or T-cells, is less than the previous amount of IgE, IgG or T-cells.

31. A detection kit for a biological cross-reactivity IgE assay comprising six or more distinct proteins each bound to a solid support, wherein the six or more distinct proteins are selected from the group consisting of proteins listed in Table 2.

32. A detection kit for a biological cross-reactivity IgE assay comprising six or more distinct proteins each bound to a solid support, wherein the six or more distinct proteins are selected from the group consisting of proteins listed in Tables 10-12.

33. A detection kit for a biological cross-reactivity IgE assay comprising six or more distinct peptides each bound to a solid support, wherein the six or more distinct peptides are selected from the group consisting of peptides listed in Tables 13-23.

34. The detection kit of any one of claims 31-33, wherein the solid support is a membrane, a filter, a chip, a slide (such as a microscopic slide), an array (such as a microarray) a wafer, a fiber, a magnetic or a non-magnetic bead, a gel, a tubing, a plate (such as a microtiter plate), a microtiter strip, a polymer, a microparticle, a sphere, a microsphere, a nanosphere, a particle, a microparticle, a nanoparticle, or a capillary.

35. The detection kit of any one of claims 31-34, further comprising an IgE or IgG labeling reagent.

36. The detection kit of claim 35, further comprising one or more of a binding buffer, a wash buffer, and a detection buffer.

37. The detection kit of any one of claims 31-36, further comprising instructions for use.

38. A method of assessing the presence or absence of cross-reactive IgE antibodies or T-cells in a biological sample, the method comprising:
(a) contacting the biological sample with a reference allergenic protein;
(b) measuring the binding of IgE antibodies or T-cells to the reference allergenic proteins; and/or;
(c) identifying any proteins that are immunologically cross-reactive to the reference allergenic protein;
to assess the presence of one or more cross-reactive IgE antibodies or T-cells.

39. The method of claim 38, wherein step (c) comprises the method of any one of claims 48-67.

40. The method of claim 38 or 39, wherein the method does not comprise measuring the binding of IgE antibodies or T-cells to proteins that are immunologically cross-reactive to the reference allergenic protein.

41. The method of any one of claims 38-40, wherein the reference allergenic protein is immobilized on a substrate.

42. The method of claim 41, wherein the substrate is membrane, a filter, a chip, a slide (such as a microscopic slide), an array (such as a microarray) a wafer, a fiber, a magnetic or a non-magnetic bead, a gel, a tubing, a plate (such as a microtiter plate), a microtiter strip, a polymer, a microparticle, a sphere, a microsphere, a nanosphere, a particle, a microparticle, a nanoparticle, or a capillary.

43. The method of claims 20-42, wherein the biological sample is selected from the group consisting of whole blood, serum, plasma, sputum, blood cells (e.g., peripheral blood mononuclear cells (PBMC), T-cells, B-cells, basophils, etc.), immune cells, a tissue sample, a biopsy sample, urine, tears, peritoneal fluid, pleural fluid, breast duct fluid, breast exudate, breast milk, breast fluids, saliva, semen, mucous, lymph, cytosol, ascites, amniotic fluid, bladder washes, and bronchioalveolar lavage.

44. A method for testing whether a subject is a candidate for a multiple allergen oral immunotherapy, the method comprising:
detecting in a biological sample from the subject the presence of IgE antibodies or T-cells that bind to a reference allergenic protein in the multiple allergen oral immunotherapy and an other protein that is immunologically cross-reactive with the reference protein,
wherein if IgE antibodies or T-cells are present in the biological sample, the subject is a candidate for the multiple allergen oral immunotherapy.

45. The method of claim 44, wherein the subject had not been identified as having an allergy to the other protein.

46. A method for diagnosing a subject as having an allergy to an allergic protein listed in the first column of any one of Tables 10-12, the method comprising evaluating the subject, or a biological sample from the subject, for an allergic response to an allergenic protein listed in the corresponding row of the second column of Tables 10-12.

47. A method for diagnosing a subject as having an allergy to an allergic peptide listed in the third column of any one of Tables 13-23, the method comprising evaluating the subject, or a biological sample from the subject, for an allergic response to an allergenic peptide listed in the corresponding row of the second column of Tables 13-23.

48. A method for identifying a protein that is immunologically cross-reactive to a reference allergenic protein, the method comprising:
(a) correlating the reference allergenic protein to an other protein that is in the same protein domain family; and/or
(b) calculating pairwise identity and/or similarity between an amino acid sequence of the reference allergenic protein and an other protein,
so as to determine whether the other protein is cross-reactive to the reference allergenic protein.

49. The method of claim 48, wherein step (b) comprises:
(i) providing a dataset comprising the amino acid sequence of the reference allergenic protein and the other protein;
(ii) inputting the dataset into a computer readable medium;
(iii) performing a bioinformatic step to calculate pairwise identity and similarity between the reference allergenic protein and the other protein; and/or
(iv) identifying the other protein as cross-reactive to the reference allergenic protein based on pairwise identity and similarity between the reference allergenic protein and the other protein.

50. The method of claim 49, wherein the bioinformatic step comprises applying an algorithm to determine homology between the reference allergenic protein and the other protein based on pairwise identity and similarity, wherein the algorithm is selected from the group consisting of GAP, BESTFIT, FASTA, TFASTA, BLAST, BLASTP, TBLASTN, FASTDB, ALIGN, CLUSTALW, and CLUSTAL-Omega, including any version thereof.

51. The method of claim 49 or 50, wherein the bioinformatic step comprises applying an algorithm comprising (identity+similarity)/2 to determine a cross-reactivity score.

52. The method of claim 51, wherein the other protein is considered cross-reactive to the reference allergenic protein if the other protein has a cross-reactivity score of ≥0.5 with respect to the reference allergenic protein.

53. The method of any one of claims 48-52, wherein the other protein is considered cross-reactive to the reference allergenic protein if the other protein has ≥70% homology to the reference allergenic protein.

54. The method of any one of claims 48-53, wherein the amino acid sequence is a full-length amino acid sequence.

55. The method of any one of claims 48-54, where the method comprises, prior to step (a), identifying the reference allergenic protein as a protein in an allergenic food source.

56. The method of any one of claims 48-55, where the method comprises, prior to step (a), mapping the reference allergenic protein to a protein domain family.

57. The method of any one of claims 48-56, wherein the method further comprises identifying a T-cell epitope peptide, a B-cell epitope peptide, and/or an MHC-binding epitope peptide in the allergenic protein that is cross-reactive to a T-cell epitope peptide, a B-cell epitope peptides and/or an MHC-binding epitope in the other protein.

58. The method of claim 57, wherein the method further comprises determining the MHC binding potential of the T-cell or B-cell peptide.

59. The method of any one of claims 48-58, wherein the reference allergenic protein is present in a multiple allergen oral immunotherapy.

60. The method of any one of claims 48-59, wherein the reference allergenic protein is selected from the group consisting of a shrimp allergen, a cod allergen, a salmon allergen, a hen's egg allergen, a cow's milk allergen, a peanut allergen, a sesame allergen, a soy allergen, a pecan allergen, a cashew allergen, a hazelnut allergen, a walnut allergen, a pistachio allergen, an almond allergen, and a wheat allergen.

61. The method of any one of claims 48-60, wherein the protein family is selected from the group consisting of: Tropomyosin, EF hand family (Beta-parvalbumin), ATP:guanido phosphotransferase (Arginine Kinase), Triosephosphate isomerase, Fructose bisphosphate aldolase class I, Alpha/beta casein, Lipocalin, Kappa-casein, Transferrin, C-type lysozyme/alpha-lactalbumin family, Serum albumin, Enolase, Serpin serine protease inhibitor, Kazal-type serine protease inhibitor, Collagen, Lipoprotein, Prolamin superfamily, Cupin, Profilin, Bet v 1 family, Oleosin, Isoflavone reductase family, Plant defensin, 60S acidic ribosomal protein, Heat shock protein Hsp70, Fe/Mn superoxide dismutase, Papain-like cysteine protease, Thaumatin-like protein, Unclassified, GILT family, Hevein-like and class I/II chitinase, Zinc finger, C3HC4 type (RING finger), SCAI family, Peroxidase, Serpin serine protease inhibitor, Thionin, Thioredoxin, Transcription elongation factor 1, Lipid transfer protein, and Triosephosphate isomerase.

62. The method of claim 61, wherein the protein family is selected from the group consisting of: Tropomyosin, Cupin, Profilin, Bet v 1, and EF hand.

63. The method of claim 62, wherein the protein family is Cupin.

64. The method of any one of claims 48-63, wherein the reference allergenic protein is selected from the group consisting of allergenic proteins listed in Table 2.

65. The method of any one of claims 48-64, wherein the other protein is selected from the group consisting of proteins listed in Table 4.

66. The method of any one of claims 48-65, wherein the other protein is selected from the group consisting of proteins listed in Tables 5-7 or Tables 10-12.

67. The method of any one of claims 48-66, wherein the method comprises identifying proteins that are immunologically cross-reactive to each reference allergenic protein present in a food source to generate an allergenic map (AllerMap) of the food source.

68. A method of treating an allergy to one or more of soybean, sesame, pistachio, pecan, hazelnut, walnut, cashew, peanut and almond in a subject in need thereof, the method comprising administering to the subject a multiple allergen oral immunotherapy composition comprising two or more of soybean, sesame, pistachio, pecan, hazelnut, walnut, cashew, peanut, almond, kiwifruit, brazil nut, coconut, buckwheat, lentil, garden pea, yellow mustard, mung bean, lupin, and/or korean pine, optionally wherein the multiple allergen oral immunotherapy composition does not comprise soybean, sesame, pistachio, pecan, hazelnut, walnut, cashew, peanut and/or almond.

69. A method of treating an allergy to soybean in a subject in need thereof, the method comprising administering to the subject a multiple allergen oral immunotherapy composition comprising one or more of kiwifruit, brazil nut, coconut, buckwheat, lentil, garden pea, yellow mustard, mung bean, lupin, and korean pine, optionally wherein the multiple allergen oral immunotherapy composition does not comprise soybean.

70. A method of treating an allergy to soybean in a subject in need thereof, the method comprising administering to the subject a multiple allergen oral immunotherapy composition comprising two or more of sesame, pistachio, pecan, hazelnut, walnut, cashew, peanut, almond, kiwifruit, brazil nut, coconut, buckwheat, lentil, garden pea, yellow mustard, mung bean, lupin, and korean pine, optionally wherein the multiple allergen oral immunotherapy composition does not comprise soybean.

71. A method of treating an allergy to sesame in a subject in need thereof, the method comprising administering to the subject a multiple allergen oral immunotherapy composition comprising one or more of kiwifruit, brazil nut, coconut, buckwheat, lentil, garden pea, yellow mustard, mung bean, lupin, and korean pine, optionally wherein the multiple allergen oral immunotherapy composition does not comprise sesame.

72. A method of treating an allergy to sesame in a subject in need thereof, the method comprising administering to the subject a multiple allergen oral immunotherapy composition comprising two or more of soybean, pistachio, pecan, hazelnut, walnut, cashew, peanut, almond, kiwifruit, brazil nut, coconut, buckwheat, lentil, garden pea, yellow mustard, mung bean, lupin, and korean pine, optionally wherein the multiple allergen oral immunotherapy composition does not comprise sesame.

73. A method of treating an allergy to pistachio in a subject in need thereof, the method comprising administering to the subject a multiple allergen oral immunotherapy composition comprising one or more of kiwifruit, brazil nut, coconut, buckwheat, lentil, garden pea, yellow mustard, mung bean, lupin, and korean pine, optionally wherein the multiple allergen oral immunotherapy composition does not comprise pistachio.

74. A method of treating an allergy to pistachio in a subject in need thereof, the method comprising administering to the subject a multiple allergen oral immunotherapy composition comprising two or more of soybean, sesame, pecan, hazelnut, walnut, cashew, peanut, almond, kiwifruit, brazil nut, coconut, buckwheat, lentil, garden pea, yellow mustard, mung bean, lupin, and korean pine, optionally wherein the multiple allergen oral immunotherapy composition does not comprise pistachio.

75. A method of treating an allergy to pecan in a subject in need thereof, the method comprising administering to the subject a multiple allergen oral immunotherapy composition comprising one or more of kiwifruit, brazil nut, coconut, buckwheat, lentil, garden pea, yellow mustard, mung bean, lupin, and korean pine, optionally wherein the multiple allergen oral immunotherapy composition does not comprise pecan.

76. A method of treating an allergy to pecan in a subject in need thereof, the method comprising administering to the subject a multiple allergen oral immunotherapy composition comprising two or more of soybean, sesame, pistachio, hazelnut, walnut, cashew, peanut, almond, kiwifruit, brazil nut, coconut, buckwheat, lentil, garden pea, yellow mustard, mung bean, lupin, and korean pine, optionally wherein the multiple allergen oral immunotherapy composition does not comprise pecan.

77. A method of treating an allergy to hazelnut in a subject in need thereof, the method comprising administering to the subject a multiple allergen oral immunotherapy composition comprising one or more of kiwifruit, brazil nut, coconut, buckwheat, lentil, garden pea, yellow mustard, mung bean, lupin, and korean pine, optionally wherein the multiple allergen oral immunotherapy composition does not comprise hazelnut.

78. A method of treating an allergy to hazelnut in a subject need thereof, the method comprising administering to the subject a multiple allergen oral immunotherapy composition comprising two or more of soybean, sesame, pistachio, pecan, walnut, cashew, peanut, almond, kiwifruit, brazil nut, coconut, buckwheat, lentil, garden pea, yellow mustard, mung bean, lupin, and korean pine, optionally wherein the multiple allergen oral immunotherapy composition does not comprise hazelnut.

79. A method of treating an allergy to walnut in a subject in need thereof, the method comprising administering to the subject a multiple allergen oral immunotherapy composition comprising one or more of kiwifruit, brazil nut, coconut, buckwheat, lentil, garden pea, yellow mustard, mung bean, lupin, and korean pine, optionally wherein the multiple allergen oral immunotherapy composition does not comprise walnut.

80. A method of treating an allergy to walnut in a subject need thereof, the method comprising administering to the subject a multiple allergen oral immunotherapy composition comprising two or more of soybean, sesame, pistachio, pecan, hazelnut, cashew, peanut, almond, kiwifruit, brazil nut, coconut, buckwheat, lentil, garden pea, yellow mustard, mung bean, lupin, and korean pine, optionally wherein the multiple allergen oral immunotherapy composition does not comprise walnut.

81. A method of treating an allergy to cashew in a subject in need thereof, the method comprising administering to the subject a multiple allergen oral immunotherapy composition comprising one or more of kiwifruit, brazil nut, coconut, buckwheat, lentil, garden pea, yellow mustard, mung bean, lupin, and korean pine, optionally wherein the multiple allergen oral immunotherapy composition does not comprise cashew.

82. A method of treating an allergy to cashew in a subject need thereof, the method comprising administering to the subject a multiple allergen oral immunotherapy composition comprising two or more of soybean, sesame, pistachio, pecan, hazelnut, walnut, peanut, almond, kiwifruit, brazil nut, coconut, buckwheat, lentil, garden pea, yellow mustard, mung bean, lupin, and korean pine, optionally wherein the multiple allergen oral immunotherapy composition does not comprise cashew.

83. A method of treating an allergy to peanut in a subject in need thereof, the method comprising administering to the subject a multiple allergen oral immunotherapy composition comprising one or more of kiwifruit, brazil nut, coconut, buckwheat, lentil, garden pea, yellow mustard, mung bean, lupin, and korean pine, optionally wherein the multiple allergen oral immunotherapy composition does not comprise peanut.

84. A method of treating an allergy to peanut in a subject need thereof, the method comprising administering to the subject a multiple allergen oral immunotherapy composition comprising two or more of soybean, sesame, pistachio, pecan, hazelnut, walnut, cashew, almond, kiwifruit, brazil nut, coconut, buckwheat, lentil, garden pea, yellow mustard, mung bean, lupin, and korean pine, optionally wherein the multiple allergen oral immunotherapy composition does not comprise peanut.

85. A method of treating an allergy to almond in a subject in need thereof, the method comprising administering to the subject a multiple allergen oral immunotherapy composition comprising one or more of kiwifruit, brazil nut, coconut, buckwheat, lentil, garden pea, yellow mustard, mung bean, lupin, and korean pine, optionally wherein the multiple allergen oral immunotherapy composition does not comprise almond.

86. A method of treating an allergy to almond in a subject need thereof, the method comprising administering to the subject a multiple allergen oral immunotherapy composition comprising two or more of soybean, sesame, pistachio, pecan, hazelnut, walnut, cashew, peanut, kiwifruit, brazil nut, coconut, buckwheat, lentil, garden pea, yellow mustard, mung bean, lupin, and korean pine, optionally wherein the multiple allergen oral immunotherapy composition does not comprise almond.

87. A method of treating an allergy to an Ana o 1 protein, or a food source comprising the Ana o 1 protein, in a subject in need thereof, the method comprising administering to the subject: a Cor a 11 protein, or a food source comprising the Cor a 11 protein; a Pis v 3 protein, or a food source comprising the Pis v 3 protein; and/or a Ses i 3 protein, or a food source comprising the Ses i 3 protein; optionally wherein the method does not comprise administering to the subject the Ana o 1 protein or a food source comprising the Ana o 1 protein.

88. A method of treating an allergy to an Ana o 2 protein, or a food source comprising the Ana o 2 protein, in a subject in need thereof, the method comprising administering to the subject: an Ara h 3 protein, or a food source comprising the Ara h 3 protein; a Car i 4 protein, or a food source comprising the Car i 4 protein; a Cor a 9 protein, or a food source comprising the Cor a 9 protein; a Gly m 6 protein, or a food source comprising the Gly m 6 protein; a Jug n 4 protein, or a food source comprising the Jug n 4 protein; a Jug r 4 protein, or a food source comprising the Jug r 4 protein; a Pis v 2 protein, or a food source comprising the Pis v 2 protein; a Pis v 5 protein, or a food source comprising the Pis v 5 protein; a Pru du 6 protein, or a food source comprising the Pru du 6 protein; a Ses i 6 protein, or a food source comprising the Ses i 6 protein; a Ses i 7 protein, or a food source comprising the Ses i 7 protein; a Ber e 2 protein, or a food source comprising the Ber e 2 protein; a Fag e 1 protein, or a food source comprising the Fag e 1 protein; a Fag t 13s g protein, or a food source comprising the Fag t 13s g protein; and/or a Sin a 2 protein, or a food source comprising the Sin a 2 protein; optionally wherein the method does not comprise administering to the subject the Ana o 2 protein or a food source comprising the Ana o 2 protein.

89. A method of treating an allergy to an Ara h 1 protein, or a food source comprising the Ara h 1 protein, in a subject in need thereof, the method comprising administering to the subject: a Car i 2 protein, or a food source comprising the Car i 2 protein; a Gly m 5 protein, or a food source comprising the Gly m 5 protein; a Jug r 2 protein, or a food source comprising the Jug r 2 protein; a Ses i 3 protein, or a food source comprising the Ses i 3 protein; a Len c 1 protein, or a food source comprising the Len c 1 protein; a Lup an 1 protein, or a food source comprising the Lup an 1 protein; a Lup a v protein, or a food source comprising the Lup a v protein; a Pis s 1 protein, or a food source comprising the Pis s 1 protein; a Pis s 2 protein, or a food source comprising the Pis s 2 protein; and/or a Vig r 2 protein, or a food source comprising the Vig r 2 protein; optionally wherein the method does not comprise administering to the subject the Ara h 1 protein or a food source comprising the Ara h 1 protein.

90. A method of treating an allergy to an Ara h 3 protein, or a food source comprising the Ara h 3 protein, in a subject in need thereof, the method comprising administering to the subject: a Car i 4 protein, or a food source comprising the Car i 4 protein; a Cor a 9 protein, or a food source comprising the Cor a 9 protein; a Jug n 4 protein, or a food source comprising the Jug n 4 protein; a Jug r 4 protein, or a food source comprising the Jug r 4 protein; a Pis v 2 protein, or a food source comprising the Pis v 2 protein; a Pis v 5 protein, or a food source comprising the Pis v 5 protein; a Pru du 6 protein, or a food source comprising the Pru du 6 protein; a Ses i 6 protein, or a food source comprising the Ses i 6 protein; a Ses i 7 protein, or a food source comprising the Ses i 7 protein; a Fag e 1 protein, or a food source comprising the Fag e 1 protein; a Fag t 13s g protein, or a food source comprising the Fag t 13s g protein; and/or an Ana o 2 protein, or a food source comprising the Ana o 2; optionally wherein the method does not comprise administering to the subject the Ara h 3 protein or a food source comprising the Ara h 3 protein.

91. A method of treating an allergy to a Ber e 2 protein, or a food source comprising the Ber e 2 protein, in a subject in need thereof, the method comprising administering to the subject: a Fag e 1 protein, or a food source comprising the Fag e 1 protein; a Fag t 13s g protein, or a food source comprising the Fag t 13s g protein; an Ana o 2 protein, or a food source comprising the Ana o 2 protein; a Car i 4 protein, or a food source comprising the Car i 4 protein; a Cor a 9 protein, or a food source comprising the Cor a 9 protein; a Gly m 6 protein, or a food source comprising the Gly m 6 protein; a Jug n 4 protein, or a food source comprising the Jug n 4 protein; a Jug r 4 protein, or a food source comprising the Jug r 4 protein; a Pis v 2 protein, or a food source comprising the Pis v 2 protein; a Pis v 5 protein, or a food source comprising the Pis v 5 protein; a Pru du 6 protein, or a food source comprising the Pru du 6 protein; a Ses i 6 protein, or a food source comprising the Ses i 6 protein; and/or a Ses i 7 protein, or a food source comprising the Ses i 7 protein; optionally wherein the method does not comprise administering to the subject the Ber e 2 protein or a food source comprising the Ber e 2 protein.

92. A method of treating an allergy to a Car i 2 protein, or a food source comprising the Car i 2 protein, in a subject in need thereof, the method comprising administering to the subject: a Cor a 11 protein, or a food source comprising the Cor a 11 protein; a Gly m 5 protein, or a food source comprising the Gly m 5 protein; a Jug r 2 protein, or a food source comprising the Jug r 2 protein; a Pis v 3 protein, or a food source comprising the Pis v 3 protein; a Ses i 3 protein, or a food source comprising the Ses i 3 protein; a Len c 1 protein, or a food source comprising the Len c 1 protein; a Lup an 1 protein, or a food source comprising the Lup an 1 protein; a Lup a v protein, or a food source comprising the Lup a v protein; a Pin k 2 protein, or a food source comprising the Pin k 2 protein; a Pis s 2 protein, or a food source comprising the Pis s 2 protein; a Vig r 2 protein, or a food source comprising the Vig r 2 protein; and/or an Ara h 1 protein, or a food source comprising the Ara h 1 protein; optionally wherein the method does not comprise administering to the subject the Car i 2 protein or a food source comprising the Car i 2 protein.

93. A method of treating an allergy to a Car i 4 protein, or a food source comprising the Car i 4 protein, in a subject in need thereof, the method comprising administering to the subject: a Cor a 9 protein, or a food source comprising the Cor a 9 protein; a Gly m 6 protein, or a food source comprising the Gly m 6 protein; a Jug n 4 protein, or a food source comprising the Jug n 4 protein; a Jug r 4 protein, or a food source comprising the Jug r 4 protein; a Pis v 2 protein, or a food source comprising the Pis v 2 protein; a Pis v 5 protein, or a food source comprising the Pis v 5 protein; a Pru du 6 protein, or a food source comprising the Pru du 6 protein; a Ses i 6 protein, or a food source comprising the Ses i 6 protein; a Ses i 7 protein, or a food source comprising the Ses i 7 protein; a Ber e 2 protein, or a food source comprising the Ber e 2 protein; a Fag e 1 protein, or a food source comprising the Fag e 1 protein; a Fag t 13s g protein, or a food source comprising the Fag t 13s g protein; a Sin a 2 protein, or a food source comprising the Sin a 2 protein; an Ana o 2 protein, or a food source comprising the Ana o 2 protein; and/or an Ara h 3 protein, or a food source comprising the Ara h 3 protein; optionally wherein the method does not comprise administering to the subject the Car i 4 protein or a food source comprising the Car i 4 protein.

94. A method of treating an allergy to a Cor a 11 protein, or a food source comprising the Cor a 11 protein, in a subject in need thereof, the method comprising administering to the subject: a Jug r 2 protein, or a food source comprising the Jug r 2 protein; a Pis v 3 protein, or a food source comprising the Pis v 3 protein; a Len c 1 protein, or a food source comprising the Len c 1 protein; a Pin k 2 protein, or a food source comprising the Pin k 2 protein; a Pis s 1 protein, or a food source comprising the Pis s 1 protein; a Pis s 2 protein, or a food source comprising the Pis s 2 protein; an Ana o 1 protein, or a food source comprising the Ana o 1 protein; and/or a Car i 2 protein, or a food source comprising the Car i 2 protein; optionally wherein the method does not comprise administering to the subject the Cor a 11 protein or a food source comprising the Cor a 11 protein.

95. A method of treating an allergy to a Cor a 9 protein, or a food source comprising the Cor a 9 protein, in a subject in need thereof, the method comprising administering to the subject: a Gly m 6 protein, or a food source comprising the Gly m 6 protein; a Jug n 4 protein, or a food source comprising the Jug n 4 protein; a Jug r 4 protein, or a food source comprising the Jug r 4 protein; a Pis v 2 protein, or a food source comprising the Pis v 2 protein; a Pis v 5 protein, or a food source comprising the Pis v 5 protein; a Pru du 6 protein, or a food source comprising the Pru du 6 protein; a Ses i 6 protein, or a food source comprising the Ses i 6 protein; a Ses i 7 protein, or a food source comprising the Ses i 7 protein; a Ber e 2 protein, or a food source comprising the Ber e 2 protein; a Fag e 1 protein, or a food source comprising the Fag e 1 protein; a Fag t 13s g protein, or a food source comprising the Fag t 13s g protein; a Sin a 2 protein, or a food source comprising the Sin a 2 protein; an Ana o 2 protein, or a food source comprising the Ana o 2 protein; an Ara h 3 protein, or a food source comprising the Ara h 3 protein; and/or a Car i 4 protein, or a food source comprising the Car i 4 protein; optionally wherein the method does not comprise administering to the subject the Cor a 9 protein or a food source comprising the Cor a 9 protein.

96. A method of treating an allergy to a Fag e 1 protein, or a food source comprising the Fag e 1 protein, in a subject in need thereof, the method comprising administering to the subject: a Fag t 13s g protein, or a food source comprising the Fag t 13s g protein; an Ana o 2 protein, or a food source comprising the Ana o 2 protein; an Ara h 3 protein, or a food source comprising the Ara h 3 protein; a Car i 4 protein, or a food source comprising the Car i 4 protein; a Cor a 9 protein, or a food source comprising the Cor a 9 protein; a Gly m 6 protein, or a food source comprising the Gly m 6 protein; a Jug r 4 protein, or a food source comprising the Jug r 4 protein; a Pis v 2 protein, or a food source comprising the Pis v 2 protein; a Pis v 5 protein, or a food source comprising the Pis v 5 protein; a Pru du 6 protein, or a food source comprising the Pru du 6 protein; a Ses i 7 protein, or a food source comprising the Ses i 7 protein; and/or a Ber e 2 protein, or a food source comprising the Ber e 2 protein; optionally wherein the method does not comprise administering to the subject the Fag e 1 protein or a food source comprising the Fag e 1 protein.

97. A method of treating an allergy to a Fag t 13s g protein, or a food source comprising the Fag t 13s g protein, in a subject in need thereof, the method comprising administering to the subject: an Ana o 2 protein, or a food source comprising the Ana o 2 protein; an Ara h 3 protein, or a food source comprising the Ara h 3 protein; a Car i 4 protein, or a food source comprising the Car i 4 protein; a Cor a 9 protein, or a food source comprising the Cor a 9 protein; a Gly m 6 protein, or a food source comprising the Gly m 6 protein; a Jug r 4 protein, or a food source comprising the Jug r 4 protein; a Pis v 2 protein, or a food source comprising the Pis v 2 protein; a Pis v 5 protein, or a food source comprising the Pis v 5 protein; a Pru du 6 protein, or a food source comprising the Pru du 6 protein; a Ses i 7 protein, or a food source comprising the Ses i 7 protein; a Ber e 2 protein, or a food source comprising the Ber e 2 protein; and/or a Fag e 1 protein, or a food source comprising the Fag e 1 protein; optionally wherein the method does not comprise administering to the subject the Fag t 13s g protein or a food source comprising the Fag t 13s g protein.

98. A method of treating an allergy to a Gly m 5 protein, or a food source comprising the Gly m 5 protein, in a subject in need thereof, the method comprising administering to the subject: a Jug r 2 protein, or a food source comprising the Jug r 2 protein; a Len c 1 protein, or a food source comprising the Len c 1 protein; a Lup an 1 protein, or a food source comprising the Lup an 1 protein; a Lup a v protein, or a food source comprising the Lup a v protein; a Pis s 1 protein, or a food source comprising the Pis s 1 protein; a Pis s 2 protein, or a food source comprising the Pis s 2 protein; a Vig r 2 protein, or a food source comprising the Vig r 2 protein; an Ara h 1 protein, or a food source comprising the Ara h 1 protein; and/or a Car i 2 protein, or a food source comprising the Car i 2 protein; optionally wherein the method does not comprise administering to the subject the Gly m 5 protein or a food source comprising the Gly m 5 protein.

99. A method of treating an allergy to a Gly m 6 protein, or a food source comprising the Gly m 6 protein, in a subject in need thereof, the method comprising administering to the subject: a Jug n 4 protein, or a food source comprising the Jug n 4 protein; a Jug r 4 protein, or a food source comprising the Jug r 4 protein; a Pis v 2 protein, or a food source comprising the Pis v 2 protein; a Pru du 6 protein, or a food source comprising the Pru du 6 protein; a Ses i 7 protein, or a food source comprising the Ses i 7 protein; a Ber e 2 protein, or a food source comprising the Ber e 2 protein; a Fag e 1 protein, or a food source comprising the Fag e 1 protein; a Fag t 13s g protein, or a food source comprising the Fag 13s g protein; an Ana o 2 protein, or a food source comprising the Ana o 2 protein; a Car i 4 protein, or a food source comprising the Car i 4 protein; and/or a Cor a 9 protein, or a food source comprising the Cor a 9 protein; optionally wherein the method does not comprise administering to the subject the Gly m 6 protein or a food source comprising the Gly m 6 protein.

100. A method of treating an allergy to a Jug n 4 protein, or a food source comprising the Jug n 4 protein, in a subject in need thereof, the method comprising administering to the subject: a Jug r 4 protein, or a food source comprising the Jug r 4 protein; a Pis v 2 protein, or a food source comprising the Pis v 2 protein; a Pis v 5 protein, or a food source comprising the Pis v 5 protein; a Pru du 6 protein, or a food source comprising the Pru du 6 protein; a Ses i 6 protein, or a food source comprising the Ses i 6 protein; a Ses i 7 protein, or a food source comprising the Ses i 7 protein; a Ber e 2 protein, or a food source comprising the Ber e 2 protein; a Sin a 2 protein, or a food source comprising the Sin a 2 protein; an Ana o 2 protein, or a food source comprising the Ana o 2 protein; an Ara h 3 protein, or a food source comprising the Ara h 3 protein; a Car i 4 protein, or a food source comprising the Car i 4 protein; a Cor a 9 protein, or a food source comprising the Cor a 9 protein; and/or a Gly m 6 protein, or a food source comprising the Gly m 6 protein; optionally wherein the method does not comprise administering to the subject the Jug n 4 protein or a food source comprising the Jug n 4 protein.

101. A method of treating an allergy to a Jug r 2 protein, or a food source comprising the Jug r 2 protein, in a subject in need thereof, the method comprising administering to the subject: a Ses i 3 protein, or a food source comprising the Ses i 3 protein; a Len c 1 protein, or a food source comprising the Len c 1 protein; a Pin k 2 protein, or a food source comprising the Pin k 2 protein; a Pis s 1 protein, or a food source comprising the Pis s 1 protein; a Pis s 2 protein, or a food source comprising the Pis s 2 protein; a Vig r 2 protein, or a food source comprising the Vig r 2 protein; an Ara h 1 protein, or a food source comprising the Ara h 1 protein; a Car i 2 protein, or a food source comprising the Car i 2 protein; a Cor a 11 protein, or a food source comprising the Cor a 11 protein; and/or a Gly m 5 protein, or a food source comprising the Gly m 5 protein; optionally wherein the method does not comprise administering to the subject the Jug r 2 protein or a food source comprising the Jug r 2 protein.

102. A method of treating an allergy to a Jug r 4 protein, or a food source comprising the Jug r 4 protein, in a subject in need thereof, the method comprising administering to the subject: a Pis v 2 protein, or a food source comprising the Pis v 2 protein; a Pis v 5 protein, or a food source comprising the Pis v 5 protein; a Pru du 6 protein, or a food source comprising the Pru du 6 protein; a Ses i 6 protein, or a food source comprising the Ses i 6 protein; a Ses i 7 protein, or a food source comprising the Ses i 7 protein; a Ber e 2 protein, or a food source comprising the Ber e 2 protein; a Fag e 1 protein, or a food source comprising the Fag e 1 protein; a Fag t 13s g protein, or a food source comprising the Fag t 13s g protein; a Sin a 2 protein, or a food source comprising the Sin a 2 protein; an Ana o 2 protein, or a food source comprising the Ana o 2 protein; an Ara h 3 protein, or a food source comprising the Ara h 3 protein; a Car i 4 protein, or a food source comprising the Car i 4 protein; a Cor a 9 protein, or a food source comprising the Cor a 9 protein; a Gly m 6 protein, or a food source comprising the Gly m 6 protein; and/or a Jug n 4 protein, or a food source comprising the Jug n 4 protein; optionally wherein the method does not comprise administering to the subject the Jug r 4 protein or a food source comprising the Jug r 4 protein.

103. A method of treating an allergy to a Len c 1 protein, or a food source comprising the Len c 1 protein, in a subject in need thereof, the method comprising administering to the subject: a Lup an 1 protein, or a food source comprising the Lup an 1 protein; a Lup a v protein, or a food source comprising the Lup a v protein; a Pis s 1 protein, or a food source comprising the Pis s 1 protein; a Pis s 2 protein, or a food source comprising the Pis s 2 protein; a Vig r 2 protein, or a food source comprising the Vig r 2 protein; an Ara h 1 protein, or a food source comprising the Ara h 1 protein; a Car i 2 protein, or a food source comprising the Car i 2 protein; a Cor a 11 protein, or a food source comprising the Cor a 11 protein; a Gly m 5 protein, or a food source comprising the Gly m 5 protein; a Jug r 2 protein, or a food source comprising the Jug r 2 protein; and/or a Ses i 3 protein, or a food source comprising the Ses i 3 protein; optionally wherein the method does not comprise administering to the subject the Len c 1 protein or a food source comprising the Len c 1 protein.

104. A method of treating an allergy to a Lup an 1 protein, or a food source comprising the Lup an 1 protein, in a subject in need thereof, the method comprising administering to the subject: a Lup a v protein, or a food source comprising the Lup a v protein; a Pis s 1 protein, or a food source comprising the Pis s 1 protein; a Pis s 2 protein, or a food source comprising the Pis s 2 protein; a Vig r 2 protein, or a food source comprising the Vig r 2 protein; an Ara h 1 protein, or a food source comprising the Ara h 1 protein; a Car i 2 protein, or a food source comprising the Car i 2 protein; a Gly m 5 protein, or a food source comprising the Gly m 5 protein; a Ses i 3 protein, or a food source comprising the Ses i 3 protein; and/or a Len c 1 protein, or a food source comprising the Len c 1 protein; optionally wherein the method does not comprise administering to the subject the Lup an 1 protein or a food source comprising the Lup an 1 protein.

105. A method of treating an allergy to a Lup a v protein, or a food source comprising the Lup a v protein, in a subject in need thereof, the method comprising administering to the subject: a Pis s 1 protein, or a food source comprising the Pis s 1 protein; a Pis s 2 protein, or a food source comprising the Pis s 2 protein; a Vig r 2 protein, or a food source comprising the Vig r 2 protein; an Ara h 1 protein, or a food source comprising the Ara h 1 protein; a Car i 2 protein, or a food source comprising the Car i 2 protein; a Gly m 5 protein, or a food source comprising the Gly m 5 protein; a Len c 1 protein, or a food source comprising the Len c 1 protein; and/or a Lup an 1 protein, or a food source comprising the Lup an 1 protein; optionally wherein the method does not comprise administering to the subject the Lup a v protein or a food source comprising the Lup a v protein.

106. A method of treating an allergy to a Pin k 2 protein, or a food source comprising the Pin k 2 protein, in a subject in need thereof, the method comprising administering to the subject: a Car i 2 protein, or a food source comprising the Car i 2 protein; a Cor a 11 protein, or a food source comprising the Cor a 11 protein; a Jug r 2 protein, or a food source comprising the Jug r 2 protein; and/or a Pis v 3 protein, or a food source comprising the Pis v 3 protein; optionally wherein the method does not comprise administering to the subject the Pin k 2 protein or a food source comprising the Pin k 2 protein.

107. A method of treating an allergy to a Pis s 1 protein, or a food source comprising the Pis s 1 protein, in a subject in need thereof, the method comprising administering to the subject: a Pis s 2 protein, or a food source comprising the Pis s 2 protein; a Vig r 2 protein, or a food source comprising the Vig r 2 protein; an Ara h 1 protein, or a food source comprising the Ara h 1 protein; a Car i 2 protein, or a food source comprising the Car i 2 protein; a Cor a 11 protein, or a food source comprising the Cor a 11 protein; a Gly m 5 protein, or a food source comprising the Gly m 5 protein; a Jug r 2 protein, or a food source comprising the Jug r 2 protein; a Ses i 3 protein, or a food source comprising the Ses i 3 protein; a Len c 1 protein, or a food source comprising the Len c 1 protein; a Lup an 1 protein, or a food source comprising the Lup an 1 protein; and/or a Lup a v protein, or a food source comprising the Lup a v protein; optionally wherein the method does not comprise administering to the subject the Pis s 1 protein or a food source comprising the Pis s 1 protein.

108. A method of treating an allergy to a Pis s 2 protein, or a food source comprising the Pis s 2 protein, in a subject in need thereof, the method comprising administering to the subject: a Vig r 2 protein, or a food source comprising the Vig r 2 protein; an Ara h 1 protein, or a food source comprising the Ara h 1 protein; a Car i 2 protein, or a food source comprising the Car i 2 protein; a Cor a 11 protein, or a food source comprising the Cor a 11 protein; a Gly m 5 protein, or a food source comprising the Gly m 5 protein; a Jug r 2 protein, or a food source comprising the Jug r 2 protein; a Ses i 3 protein, or a food source comprising the Ses i 3 protein; a Len c 1 protein, or a food source comprising the Len c 1 protein; a Lup an 1 protein, or a food source comprising the Lup an 1 protein; a Lup a v protein, or a food source comprising the Lup a v protein; and/or a Pis s 1 protein, or a food source comprising the Pis s 1 protein; optionally wherein the method does not comprise administering to the subject the Pis s 2 protein or a food source comprising the Pis s 2 protein.

109. A method of treating an allergy to a Pis v 2 protein, or a food source comprising the Pis v 2 protein, in a subject in need thereof, the method comprising administering to the subject: a Pis v 5 protein, or a food source comprising the Pis v 5 protein; a Pru du 6 protein, or a food source comprising the Pru du 6 protein; a Ses i 6 protein, or a food source comprising the Ses i 6 protein; a Ses i 7 protein, or a food source comprising the Ses i 7 protein; a Ber e 2 protein, or a food source comprising the Ber e 2 protein; a Fag e 1 protein, or a food source comprising the Fag e 1 protein; a Fag t 13s g protein, or a food source comprising the Fag t 13s g protein; an Ana o 2 protein, or a food source comprising the Ana o 2 protein; an Ara h 3 protein, or a food source comprising the Ara h 3 protein; a Car i 4 protein, or a food source comprising the Car i 4 protein; a Cor a 9 protein, or a food source comprising the Cor a 9 protein; a Gly m 6 protein, or a food source comprising the Gly m 6 protein; a Jug n 4 protein, or a food source comprising the Jug n 4 protein; and/or a Jug r 4 protein, or a food source comprising the Jug r 4 protein; optionally wherein the method does not comprise administering to the subject the Pis v 2 protein or a food source comprising the Pis v 2 protein.

110. A method of treating an allergy to a Pis v 3 protein, or a food source comprising the Pis v 3 protein, in a subject in need thereof, the method comprising administering to the subject: a Ses i 3 protein, or a food source comprising the Ses i 3 protein; a Pin k 2 protein, or a food source comprising the Pin k 2 protein; an Ana o 1 protein, or a food source comprising the Ana o 1 protein; a Car i 2 protein, or a food source comprising the Car i 2 protein; and/or a Cor a 11 protein, or a food source comprising the Cor a 11 protein; optionally wherein the method does not comprise administering to the subject the Pis v 3 protein or a food source comprising the Pis v 3 protein.

111. A method of treating an allergy to a Pru du 6 protein, or a food source comprising the Pru du 6 protein, in a subject in need thereof, the method comprising administering to the subject: a Ses i 6 protein, or a food source comprising the Ses i 6 protein; a Ses i 7 protein, or a food source comprising the Ses i 7 protein; a Ber e 2 protein, or a food source comprising the Ber e 2 protein; a Fag e 1 protein, or a food source comprising the Fag e 1 protein; a Fag t 13s g protein, or a food source comprising the Fag t 13s g protein; a Sin a 2 protein, or a food source comprising the Sin a 2 protein; an Ana o 2 protein, or a food source comprising the Ana o 2 protein; an Ara h 3 protein, or a food source comprising the Ara h 3 protein; a Car i 4 protein, or a food source comprising the Car i 4 protein; a Cor a 9 protein, or a food source comprising the Cor a 9 protein; a Gly m 6 protein, or a food source comprising the Gly m 6 protein; a Jug n 4 protein, or a food source comprising the Jug n 4 protein; a Jug r 4 protein, or a food source comprising the Jug r 4 protein; a Pis v 2 protein, or a food source comprising the Pis v 2 protein; and/or a Pis v 5 protein, or a food source comprising the Pis v 5 protein; optionally wherein the method does not comprise administering to the subject the Pru du 6 protein or a food source comprising the Pru du 6 protein.

112. A method of treating an allergy to a Ses i 3 protein, or a food source comprising the Ses i 3 protein, in a subject in need thereof, the method comprising administering to the subject: a Len c 1 protein, or a food source comprising the Len c 1 protein; a Lup an 1 protein, or a food source comprising the Lup an 1 protein; a Pis s 1 protein, or a food source comprising the Pis s 1 protein; a Pis s 2 protein, or a food source comprising the Pis s 2 protein; an Ana o 1 protein, or a food source comprising the Ana o 1 protein; an Ara h 1 protein, or a food source comprising the Ara h 1 protein; a Car i 2 protein, or a food source comprising the Car i 2 protein; a Jug r 2 protein, or a food source comprising the Jug r 2 protein; and/or a Pis v 3 protein, or a food source comprising the Pis v 3 protein; optionally wherein the method does not comprise administering to the subject the Ses i 3 protein or a food source comprising the Ses i 3 protein.

113. A method of treating an allergy to a Ses i 6 protein, or a food source comprising the Ses i 6 protein, in a subject in need thereof, the method comprising administering to the subject: a Ber e 2 protein, or a food source comprising the Ber e 2 protein; a Fag t 13s g protein, or a food source comprising the Fag t 13s g protein; an Ana o 2 protein, or a food source comprising the Ana o 2 protein; an Ara h 3 protein, or a food source comprising the Ara h 3 protein; a Car i 4 protein, or a food source comprising the Car i 4 protein; a Cor a 9 protein, or a food source comprising the Cor a 9 protein; a Jug n 4 protein, or a food source comprising the Jug n 4 protein; a Jug r 4 protein, or a food source comprising the Jug r 4 protein; a Pis v 2 protein, or a food source comprising the Pis v 2 protein; a Pis v 5 protein, or a food source comprising the Pis v 5 protein; and/or a Pru du 6 protein, or a food source comprising the Pru du 6 protein; optionally wherein the method does not comprise administering to the subject the Ses i 6 protein or a food source comprising the Ses i 6 protein.

114. A method of treating an allergy to a Ses i 7 protein, or a food source comprising the Ses i 7 protein, in a subject in need thereof, the method comprising administering to the subject: a Ber e 2 protein, or a food source comprising the Ber e 2 protein; a Fag e 1 protein, or a food source comprising the Fag e 1 protein; a Fag t 13s g protein, or a food source comprising the Fag t 13s g protein; a Sin a 2 protein, or a food source comprising the Sin a 2 protein; an Ana o 2 protein, or a food source comprising the Ana o 2 protein; an Ara h 3 protein, or a food source comprising the Ara h 3 protein; a Car i 4 protein, or a food source comprising the Car i 4 protein; a Cor a 9 protein, or a food source comprising the Cor a 9 protein; a Gly m 6 protein, or a food source comprising the Gly m 6 protein; a Jug n 4 protein, or a food source comprising the Jug n 4 protein; a Jug r 4 protein, or a food source comprising the Jug r 4 protein; a Pis v 2 protein, or a food source comprising the Pis v 2 protein; a Pis v 5 protein, or a food source comprising the Pis v 5 protein; and/or a Pru du 6 protein, or a food source comprising the Pru du 6 protein; optionally wherein the method does not comprise administering to the subject the Ses i 7 protein or a food source comprising the Ses i 7 protein.

115. A method of treating an allergy to a Sin a 2 protein, or a food source comprising the Sin a 2 protein, in a subject in need thereof, the method comprising administering to the subject: an Ana o 2 protein, or a food source comprising the Ana o 2 protein; a Car i 4 protein, or a food source comprising the Car i 4 protein; a Cor a 9 protein, or a food source comprising the Cor a 9 protein; a Jug n 4 protein, or a food source comprising the Jug n 4 protein; a Jug r 4 protein, or a food source comprising the Jug r 4 protein; a Pis v 5 protein, or a food source comprising the Pis v 5 protein; a Pru du 6 protein, or a food source comprising the Pru du 6 protein; and/or a Ses i 7 protein, or a food source comprising the Ses i 7 protein; optionally wherein the method does not comprise administering to the subject the Sin a 2 protein or a food source comprising the Sin a 2 protein.

116. A method of treating an allergy to a Vig r 2 protein, or a food source comprising the Vig r 2 protein, in a subject in need thereof, the method comprising administering to the subject: an Ara h 1 protein, or a food source comprising the Ara h 1 protein; a Car i 2 protein, or a food source comprising the Car i 2 protein; a Gly m 5 protein, or a food source comprising the Gly m 5 protein; a Jug r 2 protein, or a food source comprising the Jug r 2 protein; a Len c 1 protein, or a food source comprising the Len c 1 protein; a Lup an 1 protein, or a food source comprising the Lup an 1 protein; a Lup a v protein, or a food source comprising the Lup a v protein; a Pis s 1 protein, or a food source comprising the Pis s 1 protein; and/or a Pis s 2 protein, or a food source comprising the Pis s 2 protein; optionally wherein the method does not comprise administering to the subject the Vig r 2 protein or a food source comprising the Vig r 2 protein.

117. A method of treating an allergy to one or more of salmon, shrimp, prawn, crab, lobster, crayfish, mussel, scallop, oyster, clam, abalone, squid, octopus, and nautilus in a subject in need thereof, the method comprising administering to the subject a multiple allergen oral immunotherapy composition comprising two or more of salmon, shrimp, prawn, crab, lobster, crayfish, mussels, scallop, oyster, clam, abalone, squid, octopus, and/or nautilus, optionally wherein the multiple allergen oral immunotherapy composition does not comprise one or more of salmon, shrimp, prawn, crab, lobster, crayfish, mussels, scallop, oyster, clam, abalone, squid, octopus, and nautilus.

118. A method of treating an allergy to salmon in a subject in need thereof, the method comprising administering to the subject a multiple allergen oral immunotherapy composition comprising one or more of shrimp, prawn, crab, lobster, crayfish, mussel, scallop, oyster, clam, abalone, squid, octopus, and nautilus, optionally wherein the multiple allergen oral immunotherapy composition does not comprise salmon.

119. A method of treating an allergy to shrimp in a subject in need thereof, the method comprising administering to the subject a multiple allergen oral immunotherapy composition comprising one or more of salmon, prawn, crab, lobster, crayfish, mussel, scallop, oyster, clam, abalone, squid, octopus, and nautilus, optionally wherein the multiple allergen oral immunotherapy composition does not comprise shrimp.

120. A method of treating an allergy to prawn in a subject in need thereof, the method comprising administering to the subject a multiple allergen oral immunotherapy composition comprising one or more of salmon, shrimp, crab, lobster, crayfish, mussel, scallop, oyster, clam, abalone, squid, octopus, and nautilus, optionally wherein the multiple allergen oral immunotherapy composition does not comprise prawn.

121. A method of treating an allergy to crab in a subject in need thereof, the method comprising administering to the subject a multiple allergen oral immunotherapy composition comprising one or more of salmon, shrimp, prawn, lobster, crayfish, mussel, scallop, oyster, clam, abalone, squid, octopus, and nautilus, optionally wherein the multiple allergen oral immunotherapy composition does not comprise crab.

122. A method of treating an allergy to lobster in a subject in need thereof, the method comprising administering to the subject a multiple allergen oral immunotherapy composition comprising one or more of salmon, shrimp, prawn, crab, crayfish, mussel, scallop, oyster, clam, abalone, squid, octopus, and nautilus, optionally wherein the multiple allergen oral immunotherapy composition does not comprise lobster.

123. A method of treating an allergy to crayfish in a subject in need thereof, the method comprising administering to the subject a multiple allergen oral immunotherapy composition comprising one or more of salmon, shrimp, prawn, crab, lobster, mussel, scallop, oyster, clam, abalone, squid, octopus, and nautilus, optionally wherein the multiple allergen oral immunotherapy composition does not comprise crayfish.

124. A method of treating an allergy to mussel in a subject in need thereof, the method comprising administering to the subject a multiple allergen oral immunotherapy composition comprising one or more of salmon, shrimp, prawn, crab, lobster, crayfish, scallop, oyster, clam, abalone, squid, octopus, and nautilus, optionally wherein the multiple allergen oral immunotherapy composition does not comprise mussel.

125. A method of treating an allergy to scallop in a subject in need thereof, the method comprising administering to the subject a multiple allergen oral immunotherapy composition comprising one or more of salmon, shrimp, prawn, crab, lobster, crayfish, mussel, oyster, clam, abalone, squid, octopus, and nautilus, optionally wherein the multiple allergen oral immunotherapy composition does not comprise scallop.

126. A method of treating an allergy to oyster in a subject in need thereof, the method comprising administering to the subject a multiple allergen oral immunotherapy composition comprising one or more of salmon, shrimp, prawn, crab, lobster, crayfish, mussel, scallop, clam, abalone, squid, octopus, and nautilus, optionally wherein the multiple allergen oral immunotherapy composition does not comprise oyster.

127. A method of treating an allergy to clam in a subject in need thereof, the method comprising administering to the subject a multiple allergen oral immunotherapy composition comprising one or more of salmon, shrimp, prawn, crab, lobster, crayfish, mussel, scallop, oyster, abalone, squid, octopus, and nautilus, optionally wherein the multiple allergen oral immunotherapy composition does not comprise clam.

128. A method of treating an allergy to abalone in a subject in need thereof, the method comprising administering to the subject a multiple allergen oral immunotherapy composition comprising one or more of salmon, shrimp, prawn, crab, lobster, crayfish, mussel, scallop, oyster, clam, squid, octopus, and nautilus, optionally wherein the multiple allergen oral immunotherapy composition does not comprise abalone.

129. A method of treating an allergy to squid in a subject in need thereof, the method comprising administering to the subject a multiple allergen oral immunotherapy composition comprising one or more of salmon, shrimp, prawn, crab, lobster, crayfish, mussel, scallop, oyster, clam, abalone, octopus, and nautilus, optionally wherein the multiple allergen oral immunotherapy composition does not comprise squid.

130. A method of treating an allergy to octopus in a subject in need thereof, the method comprising administering to the subject a multiple allergen oral immunotherapy composition comprising one or more of salmon, shrimp, prawn, crab, lobster, crayfish, mussel, scallop, oyster, clam, abalone, squid, and nautilus, optionally wherein the multiple allergen oral immunotherapy composition does not comprise octopus.

131. A method of treating an allergy to nautilus in a subject in need thereof, the method comprising administering to the subject a multiple allergen oral immunotherapy composition comprising one or more of salmon, shrimp, prawn, crab, lobster, crayfish, mussel, scallop, oyster, clam, abalone, squid, and octopus, optionally wherein the multiple allergen oral immunotherapy composition does not comprise nautilus.

132. A method of treating an allergy to one or more of cod, salmon, shrimp, and carp in a subject in need thereof, the method comprising administering to the subject a multiple allergen oral immunotherapy composition comprising two or more of cod, salmon, shrimp, and carp, optionally wherein the multiple allergen oral immunotherapy composition does not comprise one or more of cod, salmon, shrimp, and carp.

133. A method of treating an allergy to cod in a subject in need thereof, the method comprising administering to the subject a multiple allergen oral immunotherapy composition comprising one or more of salmon, shrimp, and carp, optionally wherein the multiple allergen oral immunotherapy composition does not comprise cod.

134. A method of treating an allergy to salmon in a subject in need thereof, the method comprising administering to the subject a multiple allergen oral immunotherapy composition comprising two or more of cod, salmon, shrimp, and carp, optionally wherein the multiple allergen oral immunotherapy composition does not comprise salmon.

135. A method of treating an allergy to shrimp in a subject in need thereof, the method comprising administering to the subject a multiple allergen oral immunotherapy composition comprising two or more of cod, salmon, shrimp, and carp, optionally wherein the multiple allergen oral immunotherapy composition does not comprise shrimp.

136. A method of treating an allergy to carp in a subject in need thereof, the method comprising administering to the subject a multiple allergen oral immunotherapy composition comprising two or more of cod, salmon, shrimp, and carp, optionally wherein the multiple allergen oral immunotherapy composition does not comprise carp.

137. A method of treating an allergy to one or more of egg, milk, and cheese in a subject in need thereof, the method comprising administering to the subject a multiple allergen oral immunotherapy composition comprising two or more of egg, milk, and cheese, optionally wherein the multiple allergen oral immunotherapy composition does not comprise one or more of egg, milk, and cheese.

138. A method of treating an allergy to egg in a subject in need thereof, the method comprising administering to the subject a multiple allergen oral immunotherapy composition comprising one or both of milk and cheese, optionally wherein the multiple allergen oral immunotherapy composition does not comprise egg.

139. A method of treating an allergy to milk in a subject in need thereof, the method comprising administering to the subject a multiple allergen oral immunotherapy composition comprising one or both of milk and cheese, optionally wherein the multiple allergen oral immunotherapy composition does not comprise milk.

140. A method of treating an allergy to cheese in a subject in need thereof, the method comprising administering to the subject a multiple allergen oral immunotherapy composition comprising one or both of milk and cheese, optionally wherein the multiple allergen oral immunotherapy composition does not comprise cheese.

141. A method of treating an allergy to one or more of wheat, corn, barley, and oat in a subject in need thereof, the method comprising administering to the subject a multiple allergen oral immunotherapy composition comprising two or more of wheat, corn, barley, and oat, optionally wherein the multiple allergen oral immunotherapy composition does not comprise one or more of wheat, corn, barley, and oat.

142. A method of treating an allergy to wheat in a subject in need thereof, the method comprising administering to the subject a multiple allergen oral immunotherapy composition comprising one or more of corn, barley, and oat, optionally wherein the multiple allergen oral immunotherapy composition does not comprise wheat.

143. A method of treating an allergy to corn in a subject in need thereof, the method comprising administering to the subject a multiple allergen oral immunotherapy composition comprising two or more of wheat, corn, barley, and oat, optionally wherein the multiple allergen oral immunotherapy composition does not comprise corn.

144. A method of treating an allergy to barley in a subject in need thereof, the method comprising administering to the subject a multiple allergen oral immunotherapy composition comprising two or more of wheat, corn, barley, and oat, optionally wherein the multiple allergen oral immunotherapy composition does not comprise barley.

145. A method of treating an allergy to oat in a subject in need thereof, the method comprising administering to the subject a multiple allergen oral immunotherapy composition comprising two or more of wheat, corn, barley, and oat, optionally wherein the multiple allergen oral immunotherapy composition does not comprise oat.

146. A method of identifying an IgE or IgG antibody useful for detection of a cross-reactive allergenic protein, the method comprising:
(a) identifying a cross-reactive T-cell or B-cell epitope peptide within the cross-reactive allergenic protein; and
(b) identifying an IgE or IgG antibody that binds to the identified cross-reactive T-cell or B-cell epitope peptide.

147. The method of claim 146, wherein (a) comprises:
(i) identifying a T-cell or B-cell epitope peptide within a reference allergenic protein; and/or
(ii) calculating pairwise identity and/or similarity between the T-cell or B-cell epitope peptide and a T-cell or B-cell epitope from an other protein,
so as to determine whether the T-cell or B-cell from the other protein is cross-reactive to the T-cell or B-cell from the reference allergenic protein.

148. The method of claim 147, wherein (i) comprises: selecting a peptide within the reference allergenic protein; and calculating pairwise identity and/or similarity between the peptide and a known T-cell or B-cell epitope, so as to determine whether the peptide is a T-cell or B-cell epitope.

149. The method of any one of claims 146-148, further comprising determining the MHC binding potential of a T-cell epitope.

150. The method of any one of claims 146-149, wherein the method further comprises mapping the cross-reactive T-cell or B-cell epitope peptide to the full-length sequence of the cross-reactive allergenic protein.

151. The method of any one of claims 146-150, wherein the cross-reactive allergenic protein and/or the reference protein is selected from the group consisting of a shrimp allergen, a cod allergen, a salmon allergen, a hen's egg allergen, a cow's milk allergen, a peanut allergen, a sesame allergen, a soy allergen, a pecan allergen, a cashew allergen, a hazelnut allergen, a walnut allergen, a pistachio allergen, an almond allergen, and a wheat allergen.

152. The method of any one of claims 147-151, wherein the T-cell or B-cell epitope peptide within a reference allergenic protein and the T-cell or B-cell from the other protein are from the same protein family, and the protein family is selected from the group consisting of: Tropomyosin, EF hand family (Beta-parvalbumin), ATP:guanido phosphotransferase (Arginine Kinase), Triosephosphate isomerase, Fructose bisphosphate aldolase class I, Alpha/beta casein, Lipocalin, Kappa-casein, Transferrin, C-type lysozyme/alpha-lactalbumin family, Serum albumin, Enolase, Serpin serine protease inhibitor, Kazal-type serine protease inhibitor, Collagen, Lipoprotein, Prolamin superfamily, Cupin, Profilin, Bet v 1 family, Oleosin, Isoflavone reductase family, Plant defensin, 60S acidic ribosomal protein, Heat shock protein Hsp70, Fe/Mn superoxide dismutase, Papain-like cysteine protease, Thaumatin-like protein, Unclassified, GILT family, Hevein-like and class I/II chitinase, Zinc finger, C3HC4 type (RING finger), SCAI family, Peroxidase, Serpin serine protease inhibitor, Thionin, Thioredoxin, Transcription elongation factor 1, and Triosephosphate isomerase.

153. The method of claim 152, wherein the protein family is selected from the group consisting of: Tropomyosin, Cupin, Profilin, Bet v 1, and EF hand.

154. The method of claim 153, wherein the protein family is Cupin.

155. The method of any one of claims 146-154, wherein the cross-reactive allergenic protein and/or the reference protein is selected from the group consisting of allergenic proteins listed in Table 2.

156. The method of any one of claims 146-155, wherein the cross-reactive allergenic protein and/or the reference protein is selected from the group consisting of proteins listed in Table 4.

157. The method of any one of claims 146-156, wherein the cross-reactive allergenic protein and/or the reference protein is selected from the group consisting of proteins listed in Tables 5-7 or Tables 10-12.

158. An IgE or IgG antibody identified by the method of any one of claims 146-157.

159. An IgE antibody to a cross-reactive epitope sequence selected from the group consisting of: SEQ ID NOs: 1-11742.

160. An IgG antibody to a cross-reactive epitope sequence selected from the group of SEQ ID NOs: SEQ ID NOs: 1-11742.

161. A method for detecting the presence or amount of a cross-reactive allergenic protein, the method comprising:
(a) providing an IgE or IgG antibody to a cross-reactive B-cell or T-cell epitope sequence within the cross-reactive allergenic protein;
(b) contacting a sample (e.g., a biological sample) that may have the cross-reactive allergenic protein under conditions sufficient to permit binding of the IgE or IgG antibody; and
(c) detecting binding of the IgE or IgG antibody, thereby to identify the presence or amount of the cross-reactive allergenic protein.

162. The method of claim 161, wherein the cross-reactive allergenic protein is a kiwifruit, prawn, kiwi, brazil nut, lobster, celery, coconut, crab, apple, buckwheat, clam, pear, lentil, mussel, tomato, garden pea, oyster, stone fruit (e.g., apricot, peach, cherry), yellow mustard, abalone, birch tree, mung bean, squid, alder tree, lupin, octopus, white oak tree, Korean pine, house dust mite, cockroach, or yellow fever mosquito cross-reactive allergenic protein.

163. The method of any one of claims 146-162, wherein the IgE or IgG antibody binds a cross-reactive epitope sequence selected from the group consisting of: SEQ ID NOs: 1-11742.

164. The method of any one of claims 146-163, wherein the IgE or IgG antibody is immobilized on a substrate.

165. The method of claim 164, wherein the substrate is a membrane, a filter, a chip, a slide (such as a microscopic slide), an array (such as a microarray), a wafer, a fiber, a magnetic or a non-magnetic bead, a gel, a tubing, a plate (such as a microtiter plate), microtiter strips, a polymer, a microparticle, a sphere, a microsphere, a nanosphere, a particle, a microparticle, a nanoparticle, or a capillary.

166. A detection kit comprising six or more IgE or IgG antibodies of any one of claims 158-160, each bound to a solid support.

167. The kit of claim 166, wherein each solid support is a membrane, a filter, a chip, a slide (such as a microscopic slide), an array (such as a microarray), a wafer, a fiber, a magnetic or a non-magnetic bead, a gel, a tubing, a plate (such as a microtiter plate), microtiter strips, a polymer, a microparticle, a sphere, a microsphere, a nanosphere, a particle, a microparticle, a nanoparticle, or a capillary.

168. The detection kit of claim 166 or 167, further comprising an IgE or IgG labeling reagent.

169. The detection kit of any one of claims 166-168, further comprising one or more of a binding buffer, a wash buffer, and a detection buffer.

170. The detection kit of any one of claims 166-169, further comprising instructions for use.

171. A method for preparing a multiple allergen oral immunotherapy composition that is capable of treating an allergy to a reference allergenic protein that is not present in the multiple allergen oral immunotherapy, the method comprising:
(a) calculating pairwise identity and/or similarity between an amino acid sequence of the reference allergenic protein and an other protein, so as to determine whether the other protein is cross-reactive to the reference allergenic protein; and
(b) selecting the other allergenic protein as a component in the multiple allergen oral immunotherapy if the other protein is cross-reactive to the reference allergenic protein.

172. The method of claim 171, wherein step (b) comprises:
(i) providing a dataset comprising the amino acid sequence of the reference allergenic protein and the other protein;
(ii) inputting the dataset into a computer readable medium;
(iii) performing a bioinformatic step to calculate pairwise identity and similarity between the reference allergenic protein and the other protein; and/or
(iv) identifying the other protein as cross-reactive to the reference allergenic protein based on pairwise identity and similarity between the reference allergenic protein and the other protein.

173. The method of claim 172, wherein the bioinformatic step comprises applying an algorithm to determine homology between the reference allergenic protein and the other protein based on pairwise identity and similarity, wherein the algorithm is selected from the group consisting of GAP, BESTFIT, FASTA, TFASTA, BLAST, BLASTP, TBLASTN, FASTDB, ALIGN, CLUSTALW, and CLUSTAL-Omega, including any version thereof.

174. The method of claim 172 or 173, wherein the bioinformatic step comprises applying an algorithm comprising (identity+similarity)/2 to determine a cross-reactivity score.

175. The method of claim 174, wherein the other protein is considered cross-reactive to the reference allergenic protein if the other protein has a cross-reactivity score of ≥0.5 with respect to the reference allergenic protein.

176. The method of any one of claims 171-175, wherein the other protein is considered cross-reactive to the reference allergenic protein if the other protein has ≥70% homology to the reference allergenic protein.

177. The method of any one of claims 171-176, wherein the amino acid sequence is a full-length amino acid sequence.

178. The method of any one of claims 171-177, where the method comprises, prior to step (a), identifying the reference allergenic protein as a protein in an allergenic food source.

179. The method of any one of claims 171-178, where the method comprises, prior to step (a), mapping the reference allergenic protein to a protein domain family.

180. The method of any one of claims 171-179, wherein the method further comprises identifying a T-cell epitope peptide, a B-cell epitope peptide, and/or an MHC-binding epitope peptide in the reference allergenic protein that is cross-reactive to a T-cell epitope peptide, a B-cell epitope peptides and/or an MHC-binding epitope in the other protein.

181. The method of claim 180 wherein the method further comprises determining the MHC binding potential of the T-cell or B-cell peptide.

182. The method of any one of claims 171-181, wherein the reference allergenic protein and the other protein are from the same protein family, and the protein family is selected from the group consisting of: Tropomyosin, EF hand family (Beta-parvalbumin), ATP:guanido phosphotransferase (Arginine Kinase), Triosephosphate isomerase, Fructose bisphosphate aldolase class I, Alpha/beta casein, Lipocalin, Kappa-casein, Transferrin, C-type lysozyme/alpha-lactalbumin family, Serum albumin, Enolase, Serpin serine protease inhibitor, Kazal-type serine protease inhibitor, Collagen, Lipoprotein, Prolamin superfamily, Cupin, Profilin, Bet v 1 family, Oleosin, Isoflavone reductase family, Plant defensin, 60S acidic ribosomal protein, Heat shock protein Hsp70, Fe/Mn superoxide dismutase, Papain-like cysteine protease, Thaumatin-like protein, Unclassified, GILT family, Hevein-like and class I/II chitinase, Zinc finger, C3HC4 type (RING finger), SCAI family, Peroxidase, Serpin serine protease inhibitor, Thionin, Thioredoxin, Transcription elongation factor 1, and Triosephosphate isomerase.

183. The method of claim 182, wherein the protein family is selected from the group consisting of: Tropomyosin, Cupin, Profilin, Bet v 1, and EF hand.

184. The method of claim 183, wherein the protein family is Cupin.

185. The method of any one of claims 171-184, wherein the other allergenic protein is selected from the group consisting of a shrimp allergen, a cod allergen, a salmon allergen, a hen's egg allergen, a cow's milk allergen, a peanut allergen, a sesame allergen, a soy allergen, a pecan allergen, a cashew allergen, a hazelnut allergen, a walnut allergen, a pistachio allergen, an almond allergen, and a wheat allergen.

186. The method of any one of claims 171-185, wherein the other allergenic protein is selected from the group consisting of allergenic proteins listed in Table 2.

187. The method of any one of claims 171-186, wherein the reference protein is selected from the group consisting of proteins listed in Table 4.

188. The method of any one of claims 171-187, wherein the reference protein is selected from the group consisting of proteins listed in Tables 5-7 or Tables 10-12.

189. A multiple allergen oral immunotherapeutic composition prepared by the method of any one of claims 171-188.

190. A multiple allergen oral immunotherapy composition comprising:
(a) three or more Cupin family proteins; and
(b) a pharmaceutically acceptable excipient;
wherein upon administration of the oral immunotherapy composition to a subject having an allergy or at risk of having an allergy to one or more of the three or more Cupin family proteins, the subject has increased resistance to the protein as compared to treatment with one Cupin family protein alone; and/or is also treated for an allergy to a different Cupin family protein.

191. The multiple allergen oral immunotherapy composition of claim 190, wherein the three or more Cupin family proteins and/or the different Cupin family member are selected from the group consisting of proteins listed in Table 5 and Table 10.

192. The multiple allergen oral immunotherapy composition of claim 190 or 191, wherein the Cupin family proteins are selected from Pru du 6, Gly m 5, Gly m 6, and Gly m Bd, and upon administration the subject is also effectively treated for a Pis s 1, a Pis s 2 allergy and/or has more effective treatment for a Jug n 4 protein allergy as compared to administering a treatment with Jug n 4 alone.

193. A multiple allergen oral immunotherapy composition comprising:
(a) three or more Tropomyosin family proteins; and
(b) a pharmaceutically acceptable excipient;
wherein upon administration of the oral immunotherapy composition to a subject having an allergy or at risk of having an allergy to one or more of the three or more Tropomyosin family proteins, the subject has increased resistance to the protein as compared to treatment with one Tropomyosin family protein alone; and/or is also treated for an allergy to a different Tropomyosin family protein.

194. The multiple allergen oral immunotherapy composition of claim 193, wherein the three or more Tropomyosin family proteins and/or the different Tropomyosin family member are selected from the group consisting of proteins listed in Table 6 and Table 11.

195. A multiple allergen oral immunotherapy composition comprising:
(a) three or more Bet v 1 family proteins; and
(b) a pharmaceutically acceptable excipient;
wherein upon administration of the oral immunotherapy composition to a subject having an allergy or at risk of having an allergy to one or more of the three or more Bet v 1 family proteins, the subject has increased resistance to the protein as compared to treatment with one Bet v 1 family protein alone; and/or is also treated for an allergy to a different Bet v 1 family protein.

196. The multiple allergen oral immunotherapy composition of claim 195, wherein the three or more Bet v 1 family proteins and/or the different Bet v 1 family member are selected from the group consisting of proteins listed in Table 7 and Table 12.

197. An allergen immunotherapeutic composition comprising at least 4 peptides, wherein the at least 4 peptides are each (i) from 9 to 25 amino acids in length, (ii) selected from the group consisting of a T-cell epitope peptide, a B-cell epitope peptide, and an WIC-binding peptide, and (iii) derived from an allergenic protein in a protein family selected from the group consisting of Tropomyosin, EF hand family (Beta-parvalbumin), ATP:guanido phosphotransferase (Arginine Kinase), Triosephosphate isomerase, Fructose bisphosphate aldolase class I, Alpha/beta casein, Lipocalin, Kappa-casein, Transferrin, C-type lysozyme/alpha-lactalbumin family, Serum albumin, Enolase, Serpin serine protease inhibitor, Kazal-type serine protease inhibitor, Collagen, Lipoprotein, Prolamin superfamily, Cupin, Profilin, Bet v 1 family, Oleosin, Isoflavone reductase family, Plant defensin, 60S acidic ribosomal protein, Heat shock protein Hsp70, Fe/Mn superoxide dismutase, Papain-like cysteine protease, Thaumatin-like protein, Unclassified, GILT family, Hevein-like and class I/II chitinase, Zinc finger, C3HC4 type (RING finger), SCAI family, Peroxidase, Serpin serine protease inhibitor, Thionin, Thioredoxin, Transcription elongation factor 1, and Triosephosphate isomerase.

198. The allergen immunotherapeutic composition of claim 197, wherein the at least 4 peptides are each 15 amino acids in length.

199. The allergen immunotherapeutic composition of claim 197 or 198, wherein the at least 4 peptides are each derived from a protein listed in Table 4.

200. The allergen immunotherapeutic composition of any one of claims 197-199, wherein the at least 4 peptides are each derived from a protein listed in Tables 5-7 or Tables 10-12.

201. The allergen immunotherapeutic composition of any of claims 197-200, wherein the at least 4 peptides selected from the group consisting of peptides comprising the amino acid sequence of any one of SEQ ID NOs: 1-11742 or any fragments thereof.

202. The allergen immunotherapeutic composition of any of claims 195-197, wherein the at least 4 peptides selected from the group consisting of peptides consisting of the amino acid sequence of any one of SEQ ID NOs: 1-11742.
